(19) United States
(12) Patent Application Publication
(10) Pub. No.: US 2023/0193216 A1
(43) Pub. Date: Jun. 22, 2023

(54) ENGINEERED MICROORGANISM FOR IMPROVED PENTOSE FERMENTATION

(71) Applicant: Novozymes A/S, Bagsvaerd (DK)

(72) Inventors: Monica Tassone, West Sacramento, CA (US); Eric Allain, Wake Forest, NC (US)

(73) Assignee: Novozymes A/S, Bagsvaerd (DK)

(21) Appl. No.: 17/924,944

(22) PCT Filed: May 12, 2021
(86) PCT No.: PCT/US2021/032057

§ 371 Date: Nov. 11, 2022

Related U.S. Application Data
(60) Provisional application No. 63/024,036, filed on May 13, 2020.
(60) Provisional application No. 63/049,810, filed on Jul. 9, 2020.

(51) Int. Cl. C12N 9/02; C12P 7/10

(52) U.S. Cl. CPC C12N 9/0008; C12Y 102/01009; C12P 7/10

(57) ABSTRACT

Described herein are recombinant host organisms having an active pentose fermentation pathway and further comprising a heterologous polynucleotide encoding a non-phosphorylating NADP-dependent glyceraldehyde-3-phosphate dehydrogenase (GAPN). Also described are processes for producing a fermentation product, such as ethanol, from starch or cellulosic-containing material with the recombinant host organisms.

### REFERENCE TO A SEQUENCE LISTING

[0001] This application contains a Sequence Listing in computer readable form, which is incorporated herein by reference.

### BACKGROUND

[0002] Production of ethanol from starch and cellulosic containing materials is well-known in the art.

[0003] The most commonly industrially used commercial process for starch-containing material, often referred to as a “conventional process”, includes liquefying gelatinized starch at high temperature (about 85° C.) using typically a bacterial alpha-amylase, followed by simultaneous saccharification and fermentation (SSF) carried out anaerobically in the presence of typically a glucoamylase and a Saccharomyces cerevisiae yeast.

[0004] Yeasts which are used for production of ethanol for use as fuel, such as in the corn ethanol industry, require several characteristics to ensure cost effective production of the ethanol. These characteristics include ethanol tolerance, low by-product yield, rapid fermentation, and the ability to limit the amount of residual sugars remaining in the ferment. Such characteristics have a marked effect on the viability of the industrial process.

[0005] Yeast of the genus Saccharomyces exhibits many of the characteristics required for production of ethanol. In particular, strains of Saccharomyces cerevisiae are widely used for the production of ethanol in the fuel ethanol industry. Strains of Saccharomyces cerevisiae that are widely used in the fuel ethanol industry have the ability to produce high yields of ethanol under fermentation conditions found in, for example, the fermentation of corn mash. An example of such a strain is the yeast used in commercially available ethanol yeast product called ETHANOL REDO.

[0006] Efforts to establish and improve pentose (e.g., xylose) utilization of the yeast Saccharomyces cerevisiae have been reported (Kim et al., 2013, Biotechnol Adv. 31(6):851-61). These include heterologous expression of xylose reductase (XR) and xylitol dehydrogenase (XDH) from naturally xylose fermenting yeasts such as Scheffersomyces (Pichia) stipitis and various Candida species, as well as the overexpression of xylulokinase (XK) and the four enzymes in the non-oxidative pentose phosphate pathway (PPP), namely transketolase (TKL), transaldolase (TAL), ribose-5-phosphate ketol-isomerase (RKI) and D-ribulose-5-phosphate 3-epimerase (RPE). Modifying the co-factor preference of S. stipitis XR towards NADH in such systems has been found to provide metabolic advantages as well as improving anaerobic growth. Pathways replacing the XR/XDH with heterologous xylose isomerase (XI) have also been reported (e.g., WO2003/062430, WO2009/017441, WO2010/059095, WO2012/113120 and WO2012/135110). Efforts to improve arabinose utilization have been described in e.g., WO2003/095627, WO2010/074577 and U.S. Pat. No. 7,977,083. However, there remains a need for improved pentose sugar utilization in genetically-engineered yeast for production of bioethanol in an economically and commercially relevant scale.

### SUMMARY

[0007] Described herein are, inter alia, methods for producing a fermentation product, such as ethanol, from starch or cellulosic-containing material, and microorganisms suitable for use in such processes. The Applicant has surprisingly found that yeast having an active pentose fermentation pathway and expressing a non-phosphorylating NADP-dependent glyceraldehyde-3-phosphate dehydrogenase (GAPN) show remarkably improved utilization of pentose sugars during fermentation, especially under low oxygen (e.g., anaerobic) conditions, when compared to yeast without expressing the non-phosphorylating NADP-dependent glyceraldehyde-3-phosphate dehydrogenase (GAPN).

[0008] A first aspect relates to a recombinant host cell comprising a heterologous polynucleotide encoding a non-phosphorylating NADP-dependent glyceraldehyde-3-phosphate dehydrogenase (GAPN), wherein the cell comprises an active pentose fermentation pathway.

[0009] In one embodiment, the non-phosphorylating NADP-dependent glyceraldehyde-3-phosphate dehydrogenase (GAPN) has an amino acid sequence with at least 60%, e.g., at least 65%, 70%, 75%, 80%, 85%, 90%, 95%, 97%, 98%, 99%, or 100% sequence identity, to the amino acid sequence of any one of GAPNs described herein (e.g., any one of SEQ ID NOs: 262-280 or 289-300). In one embodiment, the GAPN differs by no more than ten amino acids, e.g., by no more than five amino acids, by no more than four amino acids, by no more than three amino acids, by no more than two amino acids, or by one amino acid from the amino acid sequence of any one of GAPNs described herein (e.g., any one of SEQ ID NOs: 262-280 or 289-300). In one embodiment, the GAPN comprises or consists of the amino acid sequence of any one of GAPNs described herein (e.g., any one of SEQ ID NOs: 262-280 or 289-300).

[0010] In one embodiment, the recombinant host cell comprises an active xylose fermentation pathway. In one embodiment, the cell comprises one or more active xylose fermentation pathway genes selected from: a heterologous polynucleotide encoding a xylose isomerase (XI), and a heterologous polynucleotide encoding a xylulokinase (XK). In one embodiment, the cell comprises one or more active xylose fermentation pathway genes selected from: a heterologous polynucleotide encoding a xylose reductase (XR), a heterologous polynucleotide encoding a xylitol dehydrogenase (XDH), and a heterologous polynucleotide encoding a xylulokinase (XK).

[0011] In one embodiment, the recombinant host cell comprises an active arabinose fermentation pathway. In one embodiment, cell comprises one or more active arabinose fermentation pathway genes selected from: a heterologous polynucleotide encoding a L-arabinose isomerase (AI), a heterologous polynucleotide encoding a L-ribulokinase (RK), and a heterologous polynucleotide encoding a L-ribulose-5-P4-epimerase (R5PE). In one embodiment, the cell comprises one or more active arabinose fermentation pathway genes selected from: a heterologous polynucleotide encoding an aldose reductase (AR), a heterologous polynucleotide encoding a L-arabinitol 4-dehydrogenase (LAD), a heterologous polynucleotide encoding a L-xylulose reductase (LXR), a heterologous polynucleotide encoding a xylitol dehydrogenase (XDH) and a heterologous polynucleotide encoding a xylulokinase (XK).

[0012] In one embodiment, the recombinant host cell comprises an active xylose fermentation pathway and an active arabinose fermentation pathway.

[0013] In one embodiment, the recombinant host cell further comprises a heterologous polynucleotide encoding a glucoamylase. In one embodiment, the glucoamylase has a mature polypeptide sequence with at least 60%, e.g., at least 65%, 70%, 75%, 80%, 85%, 90%, 95%, 97%, 98%, 99%, or 100% sequence identity the amino acid sequence of any one of SEQ ID NOs: 8, 102-113, 229, 230 and 244-250.

[0014] In one embodiment, the recombinant host cell further comprises a heterologous polynucleotide encoding an alpha-amylase. In one embodiment, the alpha-amylase has a mature polypeptide sequence with at least 60%, e.g., at least 65%, 70%, 75%, 80%, 85%, 90%, 95%, 97%, 98%, 99%, or 100% sequence identity the amino acid sequence of any one of SEQ ID NOs: 76-101, 121-174, 231 and 251-256.

[0015] In one embodiment, the recombinant host cell further comprises a heterologous polynucleotide encoding a phospholipase. In one embodiment, the phospholipase has a mature polypeptide sequence with at least 60%, e.g., at least 65%, 70%, 75%, 80%, 85%, 90%, 95%, 97%, 98%, 99%, or 100% sequence identity the amino acid sequence of any one of SEQ ID NOs: 235, 236, 237, 238, 239, 240, 241 and 242.

[0016] In one embodiment, the recombinant host cell further comprises a heterologous polynucleotide encoding a trehalase. In one embodiment, the trehalase has a mature polypeptide sequence with at least 60%, e.g., at least 65%, 70%, 75%, 80%, 85%, 90%, 95%, 97%, 98%, 99%, or 100% sequence identity the amino acid sequence of any one of SEQ ID NOs: 175-226.

[0017] In one embodiment, the recombinant host cell further comprises a heterologous polynucleotide encoding a protease. In one embodiment, the protease has a mature polypeptide sequence with at least 60%, e.g., at least 65%, 70%, 75%, 80%, 85%, 90%, 95%, 97%, 98%, 99%, or 100% sequence identity the amino acid sequence of any one of SEQ ID NOs: 9-73.

[0018] In one embodiment, the recombinant host cell further comprises a heterologous polynucleotide encoding a pullulanase. In one embodiment, the pullulanase has a mature polypeptide sequence with at least 60%, e.g., at least 65%, 70%, 75%, 80%, 85%, 90%, 95%, 97%, 98%, 99%, or 100% sequence identity the amino acid sequence of any one of SEQ ID NOs: 114-120.

[0019] In one embodiment, the recombinant host cell is capable of higher anaerobic growth rate on pentose (e.g., xylose and/or arabinose) compared to the same cell without the heterologous polynucleotide encoding a non-phosphorylating NADP-dependent glyceraldehyde-3-phosphate dehydrogenase (GAPN) (e.g., under conditions described in Example 2 of U.S. Provisional Application 62/946,359, filed Dec. 10, 2019). In one embodiment, the cell is capable of higher pentose (e.g., xylose and/or arabinose) consumption compared to the same cell without the heterologous polynucleotide encoding a non-phosphorylating NADP-dependent glyceraldehyde-3-phosphate dehydrogenase (GAPN) at about or after 120 hours fermentation (e.g., under conditions described in Example 2 of U.S. Provisional Application 62/946,359, filed Dec. 10, 2019). In one embodiment, the cell is capable of consuming more than 65%, e.g., at least 70%, 75%, 80%, 85%, 90%, 95% of pentose (e.g., xylose and/or arabinose) in the medium at about or after 120 hours fermentation (e.g., under conditions described in Example 2 of U.S. Provisional Application 62/946,359, filed Dec. 10, 2019). In one embodiment, the cell is capable of higher ethanol production compared to the same cell without the heterologous polynucleotide encoding a non-phosphorylating NADP-dependent glyceraldehyde-3-phosphate dehydrogenase (GAPN) under the same conditions (e.g., after 40 hours of fermentation).

[0020] In one embodiment, the recombinant host cell further comprises a heterologous polynucleotide encoding a transketolase (TKL1). In one embodiment, the cell further comprises a heterologous polynucleotide encoding a transaldolase (TAL1).

[0021] In one embodiment, the cell further comprises a disruption (e.g., inactivation) to an endogenous gene encoding a glycerol 3-phosphate dehydrogenase (GPD). In one embodiment, the cell further comprises a disruption (e.g., inactivation) to an endogenous gene encoding a glycerol 3-phosphatase (GPP). In one embodiment, the cell produces a decreased amount of glycerol (e.g., at least 25% less, at least 50% less, at least 60% less, at least 70% less, at least 80% less, or at least 90% less) compared to the cell without the disruption to the endogenous gene encoding the GPD and/or GPP when cultivated under identical conditions.

[0022] In one embodiment, the recombinant host cell is a yeast cell. In one embodiment, the cell is a Saccharomyces, Rhodotorula, Schizosaccharomyces, Kluyveromyces, Pichia, Hansenula, Rhodosporidium, Candida, Yarrowia, Lipomyces, Cryptococcus, or Dekkera sp. yeast cell. In one embodiment, the cell is Saccharomyces cerevisiae.

[0023] A second aspect relates to methods of producing a fermentation product from a starch-containing or cellulosic-containing material, the method comprising:

[0024] (a) saccharifying the starch-containing or cellulosic-containing material; and

[0025] (b) fermenting the saccharified material of step (a) with the recombinant host cell of the first aspect.

[0026] In one embodiment, the method comprises liquefying the starch-containing material at a temperature above the initial gelatinization temperature in the presence of an alpha-amylase and/or a protease prior to saccharification. In one embodiment, the fermentation product is ethanol.

[0027] A third aspect relates to methods of producing a derivative of host cell of the first aspect, comprising culturing a host cell of the first aspect with a second host cell under conditions which permit combining of DNA between the first and second host cells, and screening or selecting for a derived host cell.

[0028] A fourth aspect relates to compositions comprising the host cell of the first aspect with one or more naturally occurring and/or non-naturally occurring components, such as components selected from the group consisting of: surfactants, emulsifiers, gums, swelling agents, and antioxidants.

### BRIEF DESCRIPTION OF THE FIGURES

[0029] FIG. 1 shows a summary of pathways for the production of 3-phosphoglycerate.

[0030] FIG. 2 shows arabinose fermentation pathways from L-arabinose to D-xylulose 5-phosphate, which is then fermented to ethanol via the pentose phosphate pathway. The bacterial pathway utilizes genes L-arabinose isomerase (AI), L-ribulokinase (RK), and L-ribulose-5-P4-epimerase (RSPE) to convert L-arabinose to D-xylulose 5-phosphate. The fungal pathway proceeds using aldose reductase (AR), L-arabinitol 4-dehydrogenase (LAD), L-xylulose reductase (LXR), xylitol dehydrogenase (XDH) and xylulokinase (XK).

[0031] FIG. 3 shows xylose fermentation pathways from D-xylose to D-xylulose 5-phosphate, which is then fermented to ethanol via the pentose phosphate pathway. The oxido-reductase pathway uses an aldolase reductase (AR, such as xylose reductase (XR)) to reduce D-xylose to xylitol followed by oxidation of xylitol to D-xylulose with xylitol dehydrogenase (XDH). The isomerase pathway uses xylose isomerase (XI) to convert D-xylose directly into D-xylulose. D-xylulose is then converted to D-xylulose-5-phosphate with xylulokinase (XK).

[0032] FIG. 4 shows a plasmid map for HP39.

[0033] FIG. 5 shows a plasmid map for HP34.

[0034] FIG. 6 shows a plasmid map for TH13.

[0035] FIG. 7 shows a plasmid map for pMLBA638.

[0036] FIG. 8 shows calculated slope for strains expressing GAPN compared their respective parent strains in arabinose media.

[0037] FIG. 9 shows calculated slope for strains expressing GAPN compared their respective parent strains in xylose media.

### DEFINITIONS

[0038] Unless defined otherwise or clearly indicated by context, all technical and scientific terms used herein have the same meaning as commonly understood by one of ordinary skill in the art.

[0039] Aldose reductase: The term “aldose reductase” or “AR” is classified as E.C. 1.1.1.21 and means an enzyme that catalyzes the conversion of L-arabinose to L-arabitol. Some aldose reductase genes may be unspecific and have activity on D-xylose to produce xylitol (AKA, D-xylose reductase; classified as E.C. 1.1.1.307). Aldose reductase activity can be determined using methods known in the art (e.g., Kuhn, et al., 1995, Appl. Environ. Microbiol. 61 (4), 1580-1585).

[0040] Allelic variant: The term “allelic variant” means any of two or more alternative forms of a gene occupying the same chromosomal locus. Allelic variation arises naturally through mutation, and may result in polymorphism within populations. Gene mutations can be silent (no change in the encoded polypeptide) or may encode polypeptides having altered amino acid sequences. An allelic variant of a polypeptide is a polypeptide encoded by an allelic variant of a gene.

[0041] Alpha-amylase: The term “alpha amylase” means an 1,4-alpha-D-glucan glucanohydrolase, EC. 3.2.1.1, which catalyze hydrolysis of starch and other linear and branched 1,4-glucosidic oligo- and polysaccharides. Alpha-amylase activity can be determined using methods known in the art (e.g., using an alpha amylase assay described WO2020/023411).

[0042] L-arabinitol dehydrogenase: The term “L-arabinitol dehydrogenase” or “LAD” is classified as E.C. 1.1.1.12 and means an enzyme that catalyzes the conversion of L-arabitol to L-xylulose. L-arabinitol dehydrogenase activity can be determined using methods known in the art (e.g., as described in U.S. Pat. No. 7,527,951).

[0043] Auxiliary Activity 9: The term “Auxiliary Activity 9” or “AA9” means a polypeptide classified as a lytic polysaccharide monooxygenase (Quinlan et al., 2011, Proc. Natl. Acad. Sci. USA 208: 15079-15084; Phillips et al., 2011, ACS Chem. Biol. 6: 1399-1406; Lin et al., 2012, Structure 20: 1051-1061). AA9 polypeptides were formerly classified into the glycoside hydrolase Family 61 (GH61) according to Henrissat, 1991, Biochem. J. 280: 309-316, and Henrissat and Bairoch, 1996, Biochem. J. 316: 695-696.

[0044] AA9 polypeptides enhance the hydrolysis of a cellulosic-containing material by an enzyme having cellulolytic activity. Cellulolytic enhancing activity can be determined by measuring the increase in reducing sugars or the increase of the total of cellobiose and glucose from the hydrolysis of a cellulosic-containing material by cellulolytic enzyme under the following conditions: 1-50 mg of total protein/g of cellulose in pretreated corn stover (PCS), wherein total protein is comprised of 50-99.5% w/w cellulolytic enzyme protein and 0.5-50% w/w protein of an AA9 polypeptide for 1-7 days at a suitable temperature, such as 40 C−80° C., e.g., 50° C., 55° C., 60° C., 65° C., or 70° C., and a suitable pH, such as 4-9, e.g., 4.5, 5.0, 5.5, 6.0, 6.5, 7.0, 7.5, 8.0, or 8.5, compared to a control hydrolysis with equal total protein loading without cellulolytic enhancing activity (1-50 mg of cellulolytic protein/g of cellulose in PCS).

[0045] AA9 polypeptide enhancing activity can be determined using a mixture of CELLUCLAST® 1.5 L (Novozymes A/S, Bagsvrd, Denmark) and beta-glucosidase as the source of the cellulolytic activity, wherein the beta-glucosidase is present at a weight of at least 2-5% protein of the cellulase protein loading. In one embodiment, the beta-glucosidase is an Aspergillus oryzae beta-glucosidase (e.g., recombinantly produced in Aspergillus oryzae according to WO 02/095014). In another embodiment, the beta-glucosidase is an Aspergillus fumigatus beta-glucosidase (e.g., recombinantly produced in Aspergillus oryzae as described in WO 02/095014).

[0046] AA9 polypeptide enhancing activity can also be determined by incubating an AA9 polypeptide with 0.5% phosphoric acid swollen cellulose (PASC), 100 mM sodium acetate pH 5, 1 mM MnSO₄, 0.1% gallic acid, 0.025 mg/ml of Aspergillus fumigatus beta-glucosidase, and 0.01% TRITON® X-100 (4-(1,1,3,3-tetramethylbutyl)phenyl-polyethylene glycol) for 24-96 hours at 40° C. followed by determination of the glucose released from the PASC.

[0047] AA9 polypeptide enhancing activity can also be determined according to WO2013/028928 for high temperature compositions.

[0048] AA9 polypeptides enhance the hydrolysis of a cellulosic-containing material catalyzed by enzyme having cellulolytic activity by reducing the amount of cellulolytic enzyme required to reach the same degree of hydrolysis preferably at least 1.01-fold, e.g., at least 1.05-fold, at least 1.10-fold, at least 1.25-fold, at least 1.5-fold, at least 2-fold, at least 3-fold, at least 4-fold, at least 5-fold, at least 10-fold, or at least 20-fold.

[0049] Beta-glucosidase: The term “beta-glucosidase” means a beta-D-glucoside glucohydrolase (E.C. 3.2.1.21) that catalyzes the hydrolysis of terminal non-reducing beta-D-glucose residues with the release of beta-D-glucose. Beta-glucosidase activity can be determined using p-nitrophenyl-beta-D-glucopyranoside as substrate according to the procedure of Venturi et al., 2002, J. Basic Microbiol. 42: 55-66. One unit of beta-glucosidase is defined as 1.0 μmole of p-nitrophenolate anion produced per minute at 25° C., pH 4.8 from 1 mM p-nitrophenyl-beta-D-glucopyranoside as substrate in 50 mM sodium citrate containing 0.01% TWEEN® 20.

[0050] Beta-xylosidase: The term “beta-xylosidase” means a beta-D-xyloside xylohydrolase (E.C. 3.2.1.37) that catalyzes the exo-hydrolysis of short beta (1→4)-xylooligosaccharides to remove successive D-xylose residues from non-reducing termini. Beta-xylosidase activity can be determined using 1 mM p-nitrophenyl-beta-D-xyloside as substrate in 100 mM sodium citrate containing 0.01% TWEEN® 20 at pH 5, 40° C. One unit of beta-xylosidase is defined as 1.0 μmole of p-nitrophenolate anion produced per minute at 40° C., pH 5 from 1 mM p-nitrophenyl-beta-D-xyloside in 100 mM sodium citrate containing 0.01% TWEEN® 20.

[0051] Catalase: The term “catalase” means a hydrogen-peroxide:hydrogen-peroxide oxidoreductase (EC 1.11.1.6) that catalyzes the conversion of 2H₂O₂ to O₂+2 H₂O. For purposes of the present invention, catalase activity is determined according to U.S. Pat. No. 5,646,025. One unit of catalase activity equals the amount of enzyme that catalyzes the oxidation of 1 μmole of hydrogen peroxide under the assay conditions.

[0052] Catalytic domain: The term “catalytic domain” means the region of an enzyme containing the catalytic machinery of the enzyme.

[0053] Cellobiohydrolase: The term “cellobiohydrolase” means a 1,4-beta-D-glucan cellobiohydrolase (E.C. 3.2.1.91 and E.C. 3.2.1.176) that catalyzes the hydrolysis of 1,4-beta-D-glucosidic linkages in cellulose, cellooligosaccharides, or any beta-1,4-linked glucose containing polymer, releasing cellobiose from the reducing end (cellobiohydrolase I) or non-reducing end (cellobiohydrolase II) of the chain (Teeri, 1997, Trends in Biotechnology 15: 160-167; Teeri et al., 1998, Biochem. Soc. Trans. 26: 173-178). Cellobiohydrolase activity can be determined according to the procedures described by Lever et al., 1972, Anal. Biochem. 47: 273-279; van Tilbeurgh et al., 1982, FEBS Letters 149: 152-156; van Tilbeurgh and Claeyssens, 1985, FEBS Letters 187: 283-288; and Tomme et al., 1988, Eur. J. Biochem. 170: 575-581.

[0054] Cellulolytic enzyme or cellulase: The term “cellulolytic enzyme” or “cellulase” means one or more (e.g., several) enzymes that hydrolyze a cellulosic-containing material. Such enzymes include endoglucanase(s), cellobiohydrolase(s), beta-glucosidase(s), or combinations thereof. The two basic approaches for measuring cellulolytic enzyme activity include: (1) measuring the total cellulolytic enzyme activity, and (2) measuring the individual cellulolytic enzyme activities (endoglucanases, cellobiohydrolases, and beta-glucosidases) as reviewed in Zhang et al., 2006, Biotechnology Advances 24: 452-481. Total cellulolytic enzyme activity can be measured using insoluble substrates, including Whatman N21 filter paper, microcrystalline cellulose, bacterial cellulose, algal cellulose, cotton, pretreated lignocellulose, etc. The most common total cellulolytic activity assay is the filter paper assay using Whatman N21 filter paper as the substrate. The assay was established by the International Union of Pure and Applied Chemistry (IUPAC) (Ghose, 1987, Pure Appl. Chem. 59: 257-68).

[0055] Cellulolytic enzyme activity can be determined by measuring the increase in production/release of sugars during hydrolysis of a cellulosic-containing material by cellulolytic enzyme(s) under the following conditions: 1-50 mg of cellulolytic enzyme protein/g of cellulose in pretreated corn stover (PCS) (or other pretreated cellulosic-containing material) for 3-7 days at a suitable temperature such as 40° C.-80° C., e.g., 50° C., 55° C., 60° C., 65° C., or 70° C., and a suitable pH such as 4-9, e.g., 5.0, 5.5, 6.0, 6.5, or 7.0, compared to a control hydrolysis without addition of cellulolytic enzyme protein. Typical conditions are 1 ml reactions, washed or unwashed PCS, 5% insoluble solids (dry weight), 50 mM sodium acetate pH 5, 1 mM MnSO₄, 50° C., 55° C., or 60° C., 72 hours, sugar analysis by AMINEX® HPX-87H column chromatography (Bio-Rad Laboratories, Inc., Hercules, Calif., USA).

[0056] Coding sequence: The term “coding sequence” or “coding region” means a polynucleotide sequence, which specifies the amino acid sequence of a polypeptide. The boundaries of the coding sequence are generally determined by an open reading frame, which usually begins with the ATG start codon or alternative start codons such as GTG and TTG and ends with a stop codon such as TAA, TAG, and TGA. The coding sequence may be a sequence of genomic DNA, cDNA, a synthetic polynucleotide, and/or a recombinant polynucleotide.

[0057] Control sequence: The term “control sequence” means a nucleic acid sequence necessary for polypeptide expression. Control sequences may be native or foreign to the polynucleotide encoding the polypeptide, and native or foreign to each other. Such control sequences include, but are not limited to, a leader sequence, polyadenylation sequence, propeptide sequence, promoter sequence, signal peptide sequence, and transcription terminator sequence. The control sequences may be provided with linkers for the purpose of introducing specific restriction sites facilitating ligation of the control sequences with the coding region of the polynucleotide encoding a polypeptide.

[0058] Disruption: The term “disruption” means that a coding region and/or control sequence of a referenced gene is partially or entirely modified (such as by deletion, insertion, and/or substitution of one or more nucleotides) resulting in the absence (inactivation) or decrease in expression, and/or the absence or decrease of enzyme activity of the encoded polypeptide. The effects of disruption can be measured using techniques known in the art such as detecting the absence or decrease of enzyme activity using from cell-free extract measurements referenced herein; or by the absence or decrease of corresponding mRNA (e.g., at least 25% decrease, at least 50% decrease, at least 60% decrease, at least 70% decrease, at least 80% decrease, or at least 90% decrease); the absence or decrease in the amount of corresponding polypeptide having enzyme activity (e.g., at least 25% decrease, at least 50% decrease, at least 60% decrease, at least 70% decrease, at least 80% decrease, or at least 90% decrease); or the absence or decrease of the specific activity of the corresponding polypeptide having enzyme activity (e.g., at least 25% decrease, at least 50% decrease, at least 60% decrease, at least 70% decrease, at least 80% decrease, or at least 90% decrease). Disruptions of a particular gene of interest can be generated by methods known in the art, e.g., by directed homologous recombination (see Methods in Yeast Genetics (1997 edition), Adams, Gottschling, Kaiser, and Stems, Cold Spring Harbor Press (1998)).

[0059] Endogenous gene: The term “endogenous gene” means a gene that is native to the referenced host cell. “Endogenous gene expression” means expression of an endogenous gene.

[0060] Endoglucanase: The term “endoglucanase” means a 4-(1,3;1,4)-beta-D-glucan 4-glucanohydrolase (E.C. 3.2.1.4) that catalyzes endohydrolysis of 1,4-beta-D-glycosidic linkages in cellulose, cellulose derivatives (such as carboxymethyl cellulose and hydroxyethyl cellulose), lichenin, beta-1,4 bonds in mixed beta-1,3-1,4 glucans such as cereal beta-D-glucans or xyloglucans, and other plant material containing cellulosic components. Endoglucanase activity can be determined by measuring reduction in substrate viscosity or increase in reducing ends determined by a reducing sugar assay (Zhang et al., 2006, Biotechnology Advances 24: 452-481). Endoglucanase activity can also be determined using carboxymethyl cellulose (CMC) as substrate according to the procedure of Ghose, 1987, Pure and Appl. Chem. 59: 257-268, at pH 5, 40° C.

[0061] Expression: The term “expression” includes any step involved in the production of the polypeptide including, but not limited to, transcription, post-transcriptional modification, translation, post-translational modification, and secretion. Expression can be measured—for example, to detect increased expression—by techniques known in the art, such as measuring levels of mRNA and/or translated polypeptide.

[0062] Expression vector: The term “expression vector” means a linear or circular DNA molecule that comprises a polynucleotide encoding a polypeptide and is operably linked to control sequences that provide for its expression.

[0063] Fermentable medium: The term “fermentable medium” or “fermentation medium” refers to a medium comprising one or more (e.g., two, several) sugars, such as glucose, fructose, sucrose, cellobiose, xylose, xylulose, arabinose, mannose, galactose, and/or soluble oligosaccharides, wherein the medium is capable, in part, of being converted (fermented) by a host cell into a desired product, such as ethanol. In some instances, the fermentation medium is derived from a natural source, such as sugar cane, starch, or cellulose, and may be the result of pretreating the source by enzymatic hydrolysis (saccharification). The term fermentation medium is understood herein to refer to a medium before the fermenting organism is added, such as, a medium resulting from a saccharification process, as well as a medium used in a simultaneous saccharification and fermentation process (SSF).

[0064] Glucoamylase: The term “glucoamylase” (1,4-alpha-D-glucan glucohydrolase, EC 3.2.1.3) is defined as an enzyme that catalyzes the release of D-glucose from the non-reducing ends of starch or related oligo- and polysaccharide molecules. For purposes of the present invention, glucoamylase activity may be determined according to the procedures known in the art, such as those described in WO2020/023411.

[0065] Hemicellulolytic enzyme or hemicellulase: The term “hemicellulolytic enzyme” or “hemicellulase” means one or more (e.g., several) enzymes that hydrolyze a hemicellulosic material. See, for example, Shallom and Shoham, 2003, Current Opinion In Microbiology 6(3): 219-228). Hemicellulases are key components in the degradation of plant biomass. Examples of hemicellulases include, but are not limited to, an acetylmannan esterase, an acetylxylan esterase, an arabinanase, an arabinofuranosidase, a coumaric acid esterase, a feruloyl esterase, a galactosidase, a glucuronidase, a glucuronoyl esterase, a mannanase, a mannosidase, a xylanase, and a xylosidase. The substrates for these enzymes, hemicelluloses, are a heterogeneous group of branched and linear polysaccharides that are bound via hydrogen bonds to the cellulose microfibrils in the plant cell wall, crosslinking them into a robust network. Hemicelluloses are also covalently attached to lignin, forming together with cellulose a highly complex structure. The variable structure and organization of hemicelluloses require the concerted action of many enzymes for its complete degradation. The catalytic modules of hemicellulases are either glycoside hydrolases (GHs) that hydrolyze glycosidic bonds, or carbohydrate esterases (CEs), which hydrolyze ester linkages of acetate or ferulic acid side groups. These catalytic modules, based on homology of their primary sequence, can be assigned into GH and CE families. Some families, with an overall similar fold, can be further grouped into clans, marked alphabetically (e.g., GH-A). A most informative and updated classification of these and other carbohydrate active enzymes is available in the Carbohydrate-Active Enzymes (CAZy) database. Hemicellulolytic enzyme activities can be measured according to Ghose and Bisaria, 1987, Pure & Appl. Chem. 59: 1739-1752, at a suitable temperature such as 40° C.-80° C., e.g., 50° C., 55° C., 60° C., 65° C., or 70° C., and a suitable pH such as 4-9, e.g., 5.0, 5.5, 6.0, 6.5, or 7.0.

[0066] Heterologous polynucleotide: The term “heterologous polynucleotide” is defined herein as a polynucleotide that is not native to the host cell; a native polynucleotide in which structural modifications have been made to the coding region; a native polynucleotide whose expression is quantitatively altered as a result of a manipulation of the DNA by recombinant DNA techniques, e.g., a different (foreign) promoter; or a native polynucleotide in a host cell having one or more extra copies of the polynucleotide to quantitatively alter expression. A “heterologous gene” is a gene comprising a heterologous polynucleotide.

[0067] High stringency conditions: The term “high stringency conditions” means for probes of at least 100 nucleotides in length, prehybridization and hybridization at 42° C. in 5×SSPE, 0.3% SDS, 200 micrograms/ml sheared and denatured salmon sperm DNA, and 50% formamide, following standard Southern blotting procedures for 12 to 24 hours. The carrier material is finally washed three times each for 15 minutes using 0.2×SSC, 0.2% SDS at 65° C.

[0068] Host cell: The term “host cell” means any cell type that is susceptible to transformation, transfection, transduction, and the like with a nucleic acid construct or expression vector comprising a polynucleotide described herein. The term “host cell” encompasses any progeny of a parent cell that is not identical to the parent cell due to mutations that occur during replication. The term “recombinant cell” is defined herein as a non-naturally occurring host cell comprising one or more (e.g., two, several) heterologous polynucleotides.

[0069] Low stringency conditions: The term “low stringency conditions” means for probes of at least 100 nucleotides in length, prehybridization and hybridization at 42° C. in 5×SSPE, 0.3% SDS, 200 micrograms/ml sheared and denatured salmon sperm DNA, and 25% formamide, following standard Southern blotting procedures for 12 to 24 hours. The carrier material is finally washed three times each for 15 minutes using 0.2×SSC, 0.2% SDS at 50° C.

[0070] Mature polypeptide: The term “mature polypeptide” is defined herein as a polypeptide having biological activity that is in its final form following translation and any post-translational modifications, such as N-terminal processing, C-terminal truncation, glycosylation, phosphorylation, etc. The mature polypeptide sequence lacks a signal sequence, which may be determined using techniques known in the art (See, e.g., Zhang and Henzel, 2004, Protein Science 13: 2819-2824). The term “mature polypeptide coding sequence” means a polynucleotide that encodes a mature polypeptide.

[0071] Medium stringency conditions: The term “medium stringency conditions” means for probes of at least 100 nucleotides in length, prehybridization and hybridization at 42° C. in 5×SSPE, 0.3% SDS, 200 micrograms/ml sheared and denatured salmon sperm DNA, and 35% formamide, following standard Southern blotting procedures for 12 to 24 hours. The carrier material is finally washed three times each for 15 minutes using 0.2×SSC, 0.2% SDS at 55° C. Medium-high stringency conditions: The term “medium-high stringency conditions” means for probes of at least 100 nucleotides in length, prehybridization and hybridization at 42° C. in 5×SSPE, 0.3% SDS, 200 micrograms/ml sheared and denatured salmon sperm DNA, and 35% formamide, following standard Southern blotting procedures for 12 to 24 hours. The carrier material is finally washed three times each for 15 minutes using 0.2×SSC, 0.2% SDS at 60° C.

[0072] Non-phosphorylating NADP-dependent glyceraldehyde-3-phosphate dehydrogenase (GAPN): The term “non-phosphorylating NADP-dependent glyceraldehyde-3-phosphate dehydrogenase”, “NADP-dependent glyceraldehyde-3-phosphate dehydrogenase” or “GAPN” is defined herein as an enzyme that catalyzes the chemical reaction of glyceraldehyde-3-phosphate and NADP+ to 3-phosphoglycerate and NADPH (e.g., EC 1.2.1.9). GAPN activity may be determined from cell-free extracts as described in the art, e.g., as described in Tamoi et al., 1996, Biochem. J. 316, 685-690. For example, GAPN activity may be measured spectrophotometrically by monitoring the absorbance change following NADPH oxidation at 340 nm in a reaction mixture containing 100 mM Tris/HCl buffer (pH 8.0), 10 mM MgCl₂, 10 mM GSH, 5 mM ATP, 0.2 mM NADPH, 2 units of 3-phosphoglyceric phosphokinase, 2 mM 3-phosphoglyceric acid and the enzyme.

[0073] Nucleic acid construct: The term “nucleic acid construct” means a polynucleotide comprises one or more (e.g., two, several) control sequences. The polynucleotide may be single-stranded or double-stranded, and may be isolated from a naturally occurring gene, modified to contain segments of nucleic acids in a manner that would not otherwise exist in nature, or synthetic.

[0074] Operably linked: The term “operably linked” means a configuration in which a control sequence is placed at an appropriate position relative to the coding sequence of a polynucleotide such that the control sequence directs expression of the coding sequence.

[0075] Pentose: The term “pentose” means a five-carbon monosaccharide (e.g., xylose, arabinose, ribose, lyxose, ribulose, and xylulose). Pentoses, such as D-xylose and L-arabinose, may be derived, e.g., through saccharification of a plant cell wall polysaccharide.

[0076] Active pentose fermentation pathway: As used herein, a host cell or fermenting organism having an “active pentose fermentation pathway” produces active enzymes necessary to catalyze each reaction of a metabolic pathway in a sufficient amount to produce a fermentation product (e.g., ethanol) from pentose, and therefore is capable of producing the fermentation product in measurable yields when cultivated under fermentation conditions in the presence of pentose. A host cell or fermenting organism having an active pentose fermentation pathway comprises one or more active pentose fermentation pathway genes. A “pentose fermentation pathway gene” as used herein refers to a gene that encodes an enzyme involved in an active pentose fermentation pathway. In some embodiments, the active pentose fermentation pathway is an “active xylose fermentation pathway” (ie produces a fermentation product, such as ethanol, from xylose) or an “active arabinose fermentation pathway (ie produces a fermentation product, such as ethanol, from arabinose).

[0077] The active enzymes necessary to catalyze each reaction in an active pentose fermentation pathway may result from activities of endogenous gene expression, activities of heterologous gene expression, or from a combination of activities of endogenous and heterologous gene expression, as described in more detail herein.

[0078] Phospholipase: The term “phospholipase” means an enzyme that catalyzes the conversion of phospholipids into fatty acids and other lipophilic substances, such as phospholipase A (EC numbers 3.1.1.4, 3.1.1.5 and 3.1.1.32) or phospholipase C (EC numbers 3.1.4.3 and 3.1.4.11). Phospholipase activity may be determined using activity assays known in the art.

[0079] Pretreated corn stover: The term “Pretreated Corn Stover” or “PCS” means a cellulosic-containing material derived from corn stover by treatment with heat and dilute sulfuric acid, alkaline pretreatment, neutral pretreatment, or any pretreatment known in the art.

[0080] Protease: The term “protease” is defined herein as an enzyme that hydrolyses peptide bonds. It includes any enzyme belonging to the EC 3.4 enzyme group (including each of the thirteen subclasses thereof). The EC number refers to Enzyme Nomenclature 1992 from NC-IUBMB, Academic Press, San Diego, Calif., including supplements 1-5 published in Eur. J. Biochem. 223: 1-5 (1994); Eur. J. Biochem. 232: 1-6 (1995); Eur. J. Biochem. 237: 1-5 (1996); Eur. J. Biochem. 250: 1-6 (1997); and Eur. J. Biochem. 264: 610-650 (1999); respectively. The term “subtilases” refer to a sub-group of serine protease according to Siezen et al., 1991, Protein Engng. 4: 719-737 and Siezen et al., 1997, Protein Science 6: 501-523. Serine proteases or serine peptidases is a subgroup of proteases characterised by having a serine in the active site, which forms a covalent adduct with the substrate. Further the subtilases (and the serine proteases) are characterised by having two active site amino acid residues apart from the serine, namely a histidine and an aspartic acid residue. The subtilases may be divided into 6 sub-divisions, i.e. the Subtilisin family, the Thermitase family, the Proteinase K family, the Lantibiotic peptidase family, the Kexin family and the Pyrolysin family. The term “protease activity” means a proteolytic activity (EC 3.4). Protease activity may be determined using methods described in the art (e.g., US 2015/0125925) or using commercially available assay kits (e.g., Sigma-Aldrich).

[0081] Pullulanase: The term “pullulanase” means a starch debranching enzyme having pullulan 6-glucano-hydrolase activity (EC 3.2.1.41) that catalyzes the hydrolysis the α-1,6-glycosidic bonds in pullulan, releasing maltotriose with reducing carbohydrate ends. For purposes of the present invention, pullulanase activity can be determined according to a PHADEBAS assay or the sweet potato starch assay described in WO2016/087237.

[0082] Sequence Identity: The relatedness between two amino acid sequences or between two nucleotide sequences is described by the parameter “sequence identity”.

[0083] For purposes described herein, the degree of sequence identity between two amino acid sequences is determined using the Needleman-Wunsch algorithm (Needleman and Wunsch, J. Mol. Biol. 1970, 48, 443-453) as implemented in the Needle program of the EMBOSS package (EMBOSS: The European Molecular Biology Open Software Suite, Rice et al., Trends Genet 2000, 16, 276-277), preferably version 3.0.0 or later. The optional parameters used are gap open penalty of 10, gap extension penalty of 0.5, and the EBLOSUM62 (EMBOSS version of BLOSUM62) substitution matrix. The output of Needle labeled “longest identity” (obtained using the −nobrief option) is used as the percent identity and is calculated as follows:

(Identical Residues×100)/(Length of the Referenced Sequence−Total Number of Gaps in Alignment)

[0084] For purposes described herein, the degree of sequence identity between two deoxyribonucleotide sequences is determined using the Needleman-Wunsch algorithm (Needleman and Wunsch, 1970, supra) as implemented in the Needle program of the EMBOSS package (EMBOSS: The European Molecular Biology Open Software Suite, Rice et al., 2000, supra), preferably version 3.0.0 or later. The optional parameters used are gap open penalty of 10, gap extension penalty of 0.5, and the EDNAFULL (EMBOSS version of NCBI NUC4.4) substitution matrix. The output of Needle labeled “longest identity” (obtained using the −nobrief option) is used as the percent identity and is calculated as follows:

(Identical Deoxyribonucleotides×100)/(Length of Referenced Sequence−Total Number of Gaps in Alignment)

[0085] Signal peptide: The term “signal peptide” is defined herein as a peptide linked (fused) in frame to the amino terminus of a polypeptide having biological activity and directs the polypeptide into the cell's secretory pathway. Signal sequences may be determined using techniques known in the art (See, e.g., Zhang and Henzel, 2004, Protein Science 13: 2819-2824).

[0086] Trehalase: The term “trehalase” means an enzyme which degrades trehalose into its unit monosaccharides (i.e., glucose). Trehalases are classified in EC 3.2.1.28 (alpha,alpha-trehalase) and EC. 3.2.1.93 (alpha,alpha-phosphotrehalase). The EC classes are based on recommendations of the Nomenclature Committee of the International Union of Biochemistry and Molecular Biology (IUBMB). Description of EC classes can be found on the internet, e.g., on “http://www.expasy.org/enzyme/”. Trehalases are enzymes that catalyze the following reactions:

[0087] EC 3.2.1.28: Alpha,alpha-trehalose+H₂O⇔2 D-glucose;

[0088] EC 3.2.1.93: Alpha,alpha-trehalose 6-phosphate+H₂O⇔D-glucose+D-glucose 6-phosphate.

[0089] Trehalase activity may be determined according to procedures known in the art.

[0090] Very high stringency conditions: The term “very high stringency conditions” means for probes of at least 100 nucleotides in length, prehybridization and hybridization at 42° C. in 5×SSPE, 0.3% SDS, 200 micrograms/ml sheared and denatured salmon sperm DNA, and 50% formamide, following standard Southern blotting procedures for 12 to 24 hours. The carrier material is finally washed three times each for 15 minutes using 0.2×SSC, 0.2% SDS at 70° C.

[0091] Very low stringency conditions: The term “very low stringency conditions” means for probes of at least 100 nucleotides in length, prehybridization and hybridization at 42° C. in 5×SSPE, 0.3% SDS, 200 micrograms/ml sheared and denatured salmon sperm DNA, and 25% formamide, following standard Southern blotting procedures for 12 to 24 hours. The carrier material is finally washed three times each for 15 minutes using 0.2×SSC, 0.2% SDS at 45° C.

[0092] Xylanase: The term “xylanase” means a 1,4-beta-D-xylan-xylohydrolase (E.C. 3.2.1.8) that catalyzes the endohydrolysis of 1,4-beta-D-xylosidic linkages in xylans. Xylanase activity can be determined with 0.2% AZCL-arabinoxylan as substrate in 0.01% TRITON® X-100 and 200 mM sodium phosphate pH 6 at 37° C. One unit of xylanase activity is defined as 1.0 μmole of azurine produced per minute at 37° C., pH 6 from 0.2% AZCL-arabinoxylan as substrate in 200 mM sodium phosphate pH 6.

[0093] Xylitol dehydrogenase: The term “xylitol dehydrogenase” or “XDH” (AKA D-xylulose reductase) is classified as E.C. 1.1.1.9 and means an enzyme that catalyzes the conversion of xylitol to D-xylulose. Xylitol dehydrogenase activity can be determined using methods known in the art (e.g., Richard et al., 1999, FEBS Letters 457, 135-138).

[0094] Xylose isomerase: The term “xylose isomerase” or “XI” means an enzyme which can catalyze D-xylose into D-xylulose in vivo, and convert D-glucose into D-fructose in vitro. Xylose isomerase is also known as “glucose isomerase” and is classified as E.C. 5.3.1.5. As the structure of the enzyme is very stable, the xylose isomerase is a good model for studying the relationships between protein structure and functions (Karimaki et al., Protein Eng Des Sel, 12004, 17 (12):861-869). Xylose Isomerase activity may be determined using techniques known in the art (e.g., a coupled enzyme assay using D-sorbitol dehygrogenase, as described by Verhoeven et. al., 2017, Sci Rep 7, 46155).

[0095] Xylulokinase: The term “xylulokinase” or “XK” is classified as E.C. 2.7.1.17 and means an enzyme that catalyzes the conversion of D-xylulose to D-xylulose 5-phosphate. Xylulokinase activity can be determined using methods known in the art (e.g., Richard et al., 2000, FEBS Microbiol. Letters 190, 39-43)

[0096] L-xylulose reductase: The term “L-xylulose reductase” or “LXR” is classified as E.D. 1.1.1.10 and means an enzyme that catalyzes the conversion of L-xylulose to xylitol. L-xylulose reductase activity can be determined using methods known in the art (e.g., as described in U.S. Pat. No. 7,527,951).

[0097] Reference to “about” a value or parameter herein includes embodiments that are directed to that value or parameter per se. For example, description referring to “about X” includes the embodiment “X”. When used in combination with measured values, “about” includes a range that encompasses at least the uncertainty associated with the method of measuring the particular value, and can include a range of plus or minus two standard deviations around the stated value.

[0098] Likewise, reference to a gene or polypeptide that is “derived from” another gene or polypeptide X, includes the gene or polypeptide X.

[0099] As used herein and in the appended claims, the singular forms “a,” “or,” and “the” include plural referents unless the context clearly dictates otherwise.

[0100] It is understood that the embodiments described herein include “consisting” and/or “consisting essentially of” embodiments. As used herein, except where the context requires otherwise due to express language or necessary implication, the word “comprise” or variations such as “comprises” or “comprising” is used in an inclusive sense, i.e. to specify the presence of the stated features but not to preclude the presence or addition of further features in various embodiments.

### DETAILED DESCRIPTION

[0101] Described herein, inter alia, are host cells/fermention organism, and methods for producing a fermentation product, such as ethanol, from starch or cellulosic containing material. The Applicant has surprisingly found that yeast having an active pentose fermentation pathway and expressing a non-phosphorylating NADP-dependent glyceraldehyde-3-phosphate dehydrogenase (GAPN) show remarkably improved utilization of pentose sugars during fermentation, especially under low oxygen (e.g., anaerobic) conditions, when compared to yeast without expressing the non-phosphorylating NADP-dependent glyceraldehyde-3-phosphate dehydrogenase (GAPN).

[0102] The Applicant's finding of expressing GAPN to improve fermentation may be particularly applicable to yeast cells, which are believed to lack GAPN activity. Further, since GAPN produces NADPH rather than NADH (see FIG. 1), expressing GAPN may also be applicable to produce a fermentation product in cells that could benefit from increased NADPH (e.g., cells that overexpress an enzyme that utilizes NADPH) or cells that could benefit from decreased of NADH (e.g., cells that have disruptions to an endogenous GPD or PDC gene resulting in NADH buildup).

[0103] In one aspect is a method of producing a fermentation product from a starch-containing or cellulosic-containing material comprising:

(a) saccharifying the starch-containing or cellulosic-containing material; and
(b) fermenting the saccharified material of step (a) with a recombinant host cell;

[0104] wherein the host cell comprises an active pentose fermentation pathway and a heterologous polynucleotide encoding a non-phosphorylating NADP-dependent glyceraldehyde-3-phosphate dehydrogenase (GAPN).

[0105] Steps a) and b) may be carried out either sequentially or simultaneously (SSF). In one embodiment, steps a) and b) are carried out simultaneously (SSF). In another embodiment, steps a) and b) are carried out sequentially.

[0106] In some embodiments of the methods described herein, fermentation of step (b) consumes a greater amount of pentose (e.g., xylose and/or arabinose) e.g., at least 5%, 10%, 15%, 20%, 25%, 30%, 35%, 40%, 45%, 50%, 60%, 75% or 90% more when compared to the method using the same cell without the heterologous polynucleotide encoding a sugar transporter (e.g., under conditions described in Example 2 of U.S. Provisional Application 62/946,359, filed Dec. 10, 2019). In some embodiments, more than 65%, e.g., at least 70%, 75%, 80%, 85%, 90%, 95% of pentose (e.g., xylose and/or arabinose) in the medium is consumed.

[0107] Host Cells and Fermenting Organisms

[0108] The host cells and fermenting organisms described herein may be derived from any host cell known to the skilled artisan, such as a cell capable of producing a fermentation product (e.g., ethanol). As used herein, a “derivative” of strain is derived from a referenced strain, such as through mutagenesis, recombinant DNA technology, mating, cell fusion, or cytoduction between yeast strains. Those skilled in the art will understand that the genetic alterations, including metabolic modifications exemplified herein, may be described with reference to a suitable host organism and their corresponding metabolic reactions or a suitable source organism for desired genetic material such as genes for a desired metabolic pathway. However, given the complete genome sequencing of a wide variety of organisms and the high level of skill in the area of genomics, those skilled in the art can apply the teachings and guidance provided herein to other organisms. For example, the metabolic alterations exemplified herein can readily be applied to other species by incorporating the same or analogous encoding nucleic acid from species other than the referenced species.

[0109] The host cells described herein can be from any suitable host, such as a yeast strain, including, but not limited to, a Saccharomyces, Rhodotorula, Schizosaccharomyces, Kluyveromyces, Pichia, Hansenula, Rhodosporidium, Candida, Yarrowia, Lipomyces, Cryptococcus, or Dekkera sp. cell. In particular, Saccharomyces host cells are contemplated, such as Saccharomyces cerevisiae, bayanus or carlsbergensis cells. Preferably, the yeast cell is a Saccharomyces cerevisiae cell. Suitable cells can, for example, be derived from commercially available strains and polyploid or aneuploid industrial strains, including but not limited to those from Superstart™, THERMOSACC®, C5 FUEL™, XyloFerm®, etc. (Lallemand); RED STAR and ETHANOL RED® (Fermentis/Lesaffre); FALI (AB Mauri); Baker's Best Yeast, Baker's Compressed Yeast, etc. (Fleishmann's Yeast); BIOFERM AFT, XP, CF, and XR (North American Bioproducts Corp.); Turbo Yeast (Gert Strand AB); and FERMIOL® (DSM Specialties). Other useful yeast strains are available from biological depositories such as the American Type Culture Collection (ATCC) or the Deutsche Sammlung von Mikroorganismen and Zellkulturen GmbH (DSMZ), such as, e.g., BY4741 (e.g., ATCC 201388); Y108-1 (ATCC PTA.10567) and NRRL YB-1952 (ARS Culture Collection). Still other S. cerevisiae strains suitable as host cells DBY746, [Alpha][Eta]22, 5150-2B, GPY55-15Ba, CEN.PK, USM21, TMB3500, TMB3400, VTT-A-63015, VTT-A-85068, VTT-c-79093 and their derivatives as well as Saccharomyces sp. 1400, 424A (LNH-ST), 259A (LNH-ST) and derivatives thereof. In one embodiment, the recombinant cell is a derivative of a strain Saccharomyces cerevisiae CI BTS1260 (deposited under Accession No. NRRL Y-50973 at the Agricultural Research Service Culture Collection (NRRL), Illinois 61604 U.S.A.).

[0110] The host cell or fermenting organism may be Saccharomyces strain, e.g., Saccharomyces cerevisiae strain produced using the method described and concerned in U.S. Pat. No. 8,257,959.

[0111] The strain may also be a derivative of Saccharomyces cerevisiae strain NMI V14/004037 (See, WO2015/143324 and WO2015/143317 each incorporated herein by reference), strain nos. V15/004035, V15/004036, and V15/004037 (See, WO2016/153924 incorporated herein by reference), strain nos. V15/001459, V15/001460, V15/001461 (See, WO2016/138437 incorporated herein by reference), strain no. NRRL Y67342 (See, WO2018/098381 incorporated herein by reference), strain nos. NRRL Y67549 and NRRL Y67700 (See, WO2019/161227 incorporated herein by reference), or any strain described in WO2017/087330 (incorporated herein by reference).

[0112] The fermenting organisms according to the invention have been generated in order to, e.g., improve fermentation yield and to improve process economy by cutting enzyme costs since part or all of the necessary enzymes needed to improve method performance are be produced by the fermenting organism.

[0113] The host cells and fermenting organisms described herein may utilize expression vectors comprising the coding sequence of one or more (e.g., two, several) heterologous genes linked to one or more control sequences that direct expression in a suitable cell under conditions compatible with the control sequence(s). Such expression vectors may be used in any of the cells and methods described herein. The polynucleotides described herein may be manipulated in a variety of ways to provide for expression of a desired polypeptide. Manipulation of the polynucleotide prior to its insertion into a vector may be desirable or necessary depending on the expression vector. The techniques for modifying polynucleotides utilizing recombinant DNA methods are well known in the art.

[0114] A construct or vector (or multiple constructs or vectors) comprising the one or more (e.g., two, several) heterologous genes may be introduced into a cell so that the construct or vector is maintained as a chromosomal integrant or as a self-replicating extra-chromosomal vector as described earlier.

[0115] The various nucleotide and control sequences may be joined together to produce a recombinant expression vector that may include one or more (e.g., two, several) convenient restriction sites to allow for insertion or substitution of the polynucleotide at such sites. Alternatively, the polynucleotide(s) may be expressed by inserting the polynucleotide(s) or a nucleic acid construct comprising the sequence into an appropriate vector for expression. In creating the expression vector, the coding sequence is located in the vector so that the coding sequence is operably linked with the appropriate control sequences for expression.

[0116] The recombinant expression vector may be any vector (e.g., a plasmid or virus) that can be conveniently subjected to recombinant DNA procedures and can bring about expression of the polynucleotide. The choice of the vector will typically depend on the compatibility of the vector with the host cell into which the vector is to be introduced. The vector may be a linear or closed circular plasmid.

[0117] The vector may be an autonomously replicating vector, i.e., a vector that exists as an extrachromosomal entity, the replication of which is independent of chromosomal replication, e.g., a plasmid, an extrachromosomal element, a minichromosome, or an artificial chromosome. The vector may contain any means for assuring self-replication. Alternatively, the vector may be one that, when introduced into the host cell, is integrated into the genome and replicated together with the chromosome(s) into which it has been integrated. Furthermore, a single vector or plasmid or two or more vectors or plasmids that together contain the total DNA to be introduced into the genome of the cell, or a transposon, may be used.

[0118] The expression vector may contain any suitable promoter sequence that is recognized by a cell for expression of a gene described herein. The promoter sequence contains transcriptional control sequences that mediate the expression of the polypeptide. The promoter may be any polynucleotide that shows transcriptional activity in the cell of choice including mutant, truncated, and hybrid promoters, and may be obtained from genes encoding extracellular or intracellular polypeptides either homologous or heterologous to the cell.

[0119] Each heterologous polynucleotide described herein may be operably linked to a promoter that is foreign to the polynucleotide. For example, in one embodiment, the nucleic acid construct encoding the polypeptide of interest is operably linked to a promoter foreign to the polynucleotide. The promoters may be identical to or share a high degree of sequence identity (e.g., at least about 80%, at least about 85%, at least about 90%, at least about 95%, at least about 96%, at least about 97%, at least about 98%, or at least about 99%) with a selected native promoter.

[0120] Examples of suitable promoters for directing the transcription of the nucleic acid constructs in a yeast cells, include, but are not limited to, the promoters obtained from the genes for enolase, (e.g., S. cerevisiae enolase or I. orientalis enolase (ENO1)), galactokinase (e.g., S. cerevisiae galactokinase or I. orientalis galactokinase (GAL1)), alcohol dehydrogenase/glyceraldehyde-3-phosphate dehydrogenase (e.g., S. cerevisiae alcohol dehydrogenase/glyceraldehyde-3-phosphate dehydrogenase or I. orientalis alcohol dehydrogenase/glyceraldehyde-3-phosphate dehydrogenase (ADH1, ADH2/GAP)), triose phosphate isomerase (e.g., S. cerevisiae triose phosphate isomerase or I. orientalis triose phosphate isomerase (TPI)), metallothionein (e.g., S. cerevisiae metallothionein or I. orientalis metallothionein (CUP1)), 3-phosphoglycerate kinase (e.g., S. cerevisiae 3-phosphoglycerate kinase or I. orientalis 3-phosphoglycerate kinase (PGK)), PDC1, xylose reductase (XR), xylitol dehydrogenase (XDH), L-(+)-lactate-cytochrome c oxidoreductase (CYB2), translation elongation factor-1 (TEF1), translation elongation factor-2 (TEF2), glyceraldehyde-3-phosphate dehydrogenase (GAPDH), and orotidine 5′-phosphate decarboxylase (URA3) genes. Other suitable promoters may be obtained from S. cerevisiae TDH3, HXT7, PGK1, RPL18B and CCW12 genes. Additional useful promoters for yeast host cells are described by Romanos et al., 1992, Yeast 8: 423-488.

[0121] The control sequence may also be a suitable transcription terminator sequence, which is recognized by a host cell to terminate transcription. The terminator sequence is operably linked to the 3′-terminus of the polynucleotide encoding the polypeptide. Any terminator that is functional in the yeast cell of choice may be used. The terminator may be identical to or share a high degree of sequence identity (e.g., at least about 80%, at least about 85%, at least about 90%, at least about 95%, at least about 96%, at least about 97%, at least about 98%, or at least about 99%) with the selected native terminator.

[0122] Suitable terminators for yeast host cells may be obtained from the genes for enolase (e.g., S. cerevisiae or I. orientalis enolase cytochrome C (e.g., S. cerevisiae or I. orientalis cytochrome (CYC1)), glyceraldehyde-3-phosphate dehydrogenase (e.g., S. cerevisiae or I. orientalis glyceraldehyde-3-phosphate dehydrogenase (gpd)), PDC1, XR, XDH, transaldolase (TAL), transketolase (TKL), ribose 5-phosphate ketol-isomerase (RKI), CYB2, and the galactose family of genes (especially the GAL10 terminator). Other suitable terminators may be obtained from S. cerevisiae ENO2 or TEF1 genes. Additional useful terminators for yeast host cells are described by Romanos et al., 1992, supra.

[0123] The control sequence may also be an mRNA stabilizer region downstream of a promoter and upstream of the coding sequence of a gene which increases expression of the gene.

[0124] Examples of suitable mRNA stabilizer regions are obtained from a Bacillus thuringiensis cryIIIA gene (WO 94/25612) and a Bacillus subtilis SP82 gene (Hue et al., 1995, Journal of Bacteriology 177: 3465-3471).

[0125] The control sequence may also be a suitable leader sequence, when transcribed is a non-translated region of an mRNA that is important for translation by the host cell. The leader sequence is operably linked to the 5′-terminus of the polynucleotide encoding the polypeptide. Any leader sequence that is functional in the yeast cell of choice may be used.

[0126] Suitable leaders for yeast host cells are obtained from the genes for enolase (e.g., S. cerevisiae or I. orientalis enolase (ENO-1)), 3-phosphoglycerate kinase (e.g., S. cerevisiae or I. orientalis 3-phosphoglycerate kinase), alpha-factor (e.g., S. cerevisiae or I. orientalis alpha-factor), and alcohol dehydrogenase/glyceraldehyde-3-phosphate dehydrogenase (e.g., S. cerevisiae or I. orientalis alcohol dehydrogenase/glyceraldehyde-3-phosphate dehydrogenase (ADH2/GAP)).

[0127] The control sequence may also be a polyadenylation sequence; a sequence operably linked to the 3′-terminus of the polynucleotide and, when transcribed, is recognized by the host cell as a signal to add polyadenosine residues to transcribed mRNA. Any polyadenylation sequence that is functional in the host cell of choice may be used. Useful polyadenylation sequences for yeast cells are described by Guo and Sherman, 1995, Mol. Cellular Biol. 15: 5983-5990.

[0128] The control sequence may also be a signal peptide coding region that encodes a signal peptide linked to the N-terminus of a polypeptide and directs the polypeptide into the cell's secretory pathway. The 5′-end of the coding sequence of the polynucleotide may inherently contain a signal peptide coding sequence naturally linked in translation reading frame with the segment of the coding sequence that encodes the polypeptide. Alternatively, the 5′-end of the coding sequence may contain a signal peptide coding sequence that is foreign to the coding sequence. A foreign signal peptide coding sequence may be required where the coding sequence does not naturally contain a signal peptide coding sequence. Alternatively, a foreign signal peptide coding sequence may simply replace the natural signal peptide coding sequence in order to enhance secretion of the polypeptide. However, any signal peptide coding sequence that directs the expressed polypeptide into the secretory pathway of a host cell may be used. Useful signal peptides for yeast host cells are obtained from the genes for Saccharomyces cerevisiae alpha-factor and Saccharomyces cerevisiae invertase. Other useful signal peptide coding sequences are described by Romanos et al., 1992, supra. Signal peptides are also described in U.S. Provisional application No. 62/883,519, filed Aug. 6, 2019 (incorporated herein by reference).

[0129] The control sequence may also be a propeptide coding sequence that encodes a propeptide positioned at the N-terminus of a polypeptide. The resultant polypeptide is known as a proenzyme or propolypeptide (or a zymogen in some cases). A propolypeptide is generally inactive and can be converted to an active polypeptide by catalytic or autocatalytic cleavage of the propeptide from the propolypeptide. The propeptide coding sequence may be obtained from the genes for Bacillus subtilis alkaline protease (aprE), Bacillus subtilis neutral protease (nprT), Myceliophthora thermophila laccase (WO95/33836), Rhizomucor miehei aspartic proteinase, and Saccharomyces cerevisiae alpha-factor.

[0130] Where both signal peptide and propeptide sequences are present, the propeptide sequence is positioned next to the N-terminus of a polypeptide and the signal peptide sequence is positioned next to the N-terminus of the propeptide sequence.

[0131] It may also be desirable to add regulatory sequences that allow the regulation of the expression of the polypeptide relative to the growth of the host cell. Examples of regulatory systems are those that cause the expression of the gene to be turned on or off in response to a chemical or physical stimulus, including the presence of a regulatory compound. Regulatory systems in prokaryotic systems include the lac, tac, and trp operator systems. In yeast, the ADH2 system or GAL1 system may be used.

[0132] The vectors may contain one or more (e.g., two, several) selectable markers that permit easy selection of transformed, transfected, transduced, or the like cells. A selectable marker is a gene the product of which provides for biocide or viral resistance, resistance to heavy metals, prototrophy to auxotrophs, and the like. Suitable markers for yeast host cells include, but are not limited to, ADE2, HIS3, LEU2, LYS2, MET3, TRP1, and URA3.

[0133] The vectors may contain one or more (e.g., two, several) elements that permit integration of the vector into the host cell's genome or autonomous replication of the vector in the cell independent of the genome.

[0134] For integration into the host cell genome, the vector may rely on the polynucleotide's sequence encoding the polypeptide or any other element of the vector for integration into the genome by homologous or non-homologous recombination. Alternatively, the vector may contain additional polynucleotides for directing integration by homologous recombination into the genome of the host cell at a precise location(s) in the chromosome(s). To increase the likelihood of integration at a precise location, the integrational elements should contain a sufficient number of nucleic acids, such as 100 to 10,000 base pairs, 400 to 10,000 base pairs, and 800 to 10,000 base pairs, which have a high degree of sequence identity to the corresponding target sequence to enhance the probability of homologous recombination. The integrational elements may be any sequence that is homologous with the target sequence in the genome of the host cell. Furthermore, the integrational elements may be non-encoding or encoding polynucleotides. On the other hand, the vector may be integrated into the genome of the host cell by non-homologous recombination. Potential integration loci include those described in the art (e.g., See US2012/0135481).

[0135] For autonomous replication, the vector may further comprise an origin of replication enabling the vector to replicate autonomously in the yeast cell. The origin of replication may be any plasmid replicator mediating autonomous replication that functions in a cell. The term “origin of replication” or “plasmid replicator” means a polynucleotide that enables a plasmid or vector to replicate in vivo. Examples of origins of replication for use in a yeast host cell are the 2 micron origin of replication, ARS1, ARS4, the combination of ARS1 and CEN3, and the combination of ARS4 and CEN6.

[0136] More than one copy of a polynucleotide described herein may be inserted into a host cell to increase production of a polypeptide. An increase in the copy number of the polynucleotide can be obtained by integrating at least one additional copy of the sequence into the yeast cell genome or by including an amplifiable selectable marker gene with the polynucleotide where cells containing amplified copies of the selectable marker gene, and thereby additional copies of the polynucleotide, can be selected for by cultivating the cells in the presence of the appropriate selectable agent.

[0137] The procedures used to ligate the elements described above to construct the recombinant expression vectors described herein are well known to one skilled in the art (see, e.g., Sambrook et al., 1989, Molecular Cloning, A Laboratory Manual, 2d edition, Cold Spring Harbor, New York).

[0138] Additional procedures and techniques known in the art for the preparation of recombinant cells for ethanol fermentation, are described in, e.g., WO2016/045569, the content of which is hereby incorporated by reference.

[0139] The host cell or fermenting organism may be in the form of a composition comprising a host cell or fermenting organism (e.g., a yeast strain described herein) and a naturally occurring and/or a non-naturally occurring component.

[0140] The host cell or fermenting organism described herein may be in any viable form, including crumbled, dry, including active dry and instant, compressed, cream (liquid) form etc. In one embodiment, the host cell or fermenting organism (e.g., a Saccharomyces cerevisiae yeast strain) is dry yeast, such as active dry yeast or instant yeast. In one embodiment, the host cell or fermenting organism (e.g., a Saccharomyces cerevisiae yeast strain) is crumbled yeast. In one embodiment, the host cell or fermenting organism (e.g., a Saccharomyces cerevisiae yeast strain) is compressed yeast. In one embodiment, the host cell or fermenting organism (e.g., a Saccharomyces cerevisiae yeast strain) is cream yeast.

[0141] In one embodiment is a composition comprising a host cell or fermenting organism described herein (e.g., a Saccharomyces cerevisiae yeast strain), and one or more of the component selected from the group consisting of: surfactants, emulsifiers, gums, swelling agent, and antioxidants and other processing aids.

[0142] The compositions described herein may comprise a host cell or fermenting organism described herein (e.g., a Saccharomyces cerevisiae yeast strain) and any suitable surfactants. In one embodiment, the surfactant(s) is/are an anionic surfactant, cationic surfactant, and/or nonionic surfactant.

[0143] The compositions described herein may comprise a host cell or fermenting organism described herein (e.g., a Saccharomyces cerevisiae yeast strain) and any suitable emulsifier. In one embodiment, the emulsifier is a fatty-acid ester of sorbitan. In one embodiment, the emulsifier is selected from the group of sorbitan monostearate (SMS), citric acid esters of monodiglycerides, polyglycerolester, fatty acid esters of propylene glycol.

[0144] In one embodiment, the composition comprises a host cell or fermenting organism described herein (e.g., a Saccharomyces cerevisiae yeast strain), and Olindronal SMS, Olindronal SK, or Olindronal SPL including composition concerned in EP 1,724,336 (hereby incorporated by reference). These products are commercially available from Bussetti, Austria, for active dry yeast.

[0145] The compositions described herein may comprise a host cell or fermenting organism described herein (e.g., a Saccharomyces cerevisiae yeast strain) and any suitable gum. In one embodiment, the gum is selected from the group of carob, guar, tragacanth, arabic, xanthan and acacia gum, in particular for cream, compressed and dry yeast.

[0146] The compositions described herein may comprise a host cell or fermenting organism described herein (e.g., a Saccharomyces cerevisiae yeast strain) and any suitable swelling agent. In one embodiment, the swelling agent is methyl cellulose or carboxymethyl cellulose.

[0147] The compositions described herein may comprise a host cell or fermenting organism described herein (e.g., a Saccharomyces cerevisiae yeast strain) and any suitable antioxidant. In one embodiment, the antioxidant is butylated hydroxyanisol (BHA) and/or butylated hydroxytoluene (BHT), or ascorbic acid (vitamin C), particular for active dry yeast.

[0148] Non-phosphorylating NADP-dependent glyceraldehyde-3-phosphate dehydrogenases (GAPNs)

[0149] The non-phosphorylating NADP-dependent glyceraldehyde-3-phosphate dehydrogenase (GAPN) can be any GAPN that is suitable for the host cells and their methods of use described herein, such as a naturally occurring GAPN (e.g., an endogenous GAPN or a native GAPN from another species) or a variant thereof that retains GAPN activity. In one aspect, GAPN is present in the cytosol of the host cells.

[0150] GAPN activity may be determined from cell-free extracts as described in the art, e.g., as described in Tamoi et al., 1996, Biochem. J. 316, 685-690. For example, GAPN activity may be measured spectrophotometrically by monitoring the absorbance change following NADPH oxidation at 340 nm in a reaction mixture containing 100 mM Tris/HCl buffer (pH 8.0), 10 mM MgCl₂, 10 mM GSH, 5 mM ATP, 0.2 mM NADPH, 2 units of 3-phosphoglyceric phosphokinase, 2 mM 3-phosphoglyceric acid and the enzyme.

[0151] In some embodiments, the host cell or fermenting organism comprises a heterologous polynucleotide encoding a GAPN. In some embodiments, the host cell or fermenting organism comprising a heterologous polynucleotide encoding a GAPN has an increased level of GAPN activity compared to the host cell or fermenting organism without the heterologous polynucleotide encoding the GAPN, when cultivated under the same conditions. In some embodiments, the host cell or fermenting organism has an increased level of GAPN activity of at least 5%, e.g., at least 10%, at least 15%, at least 20%, at least 25%, at least 50%, at least 100%, at least 150%, at least 200%, at least 300%, or at 500% compared to host cell or fermenting organism without the heterologous polynucleotide encoding the GAPN, when cultivated under the same conditions.

[0152] Exemplary GAPNs that may be expressed with the host cells or fermenting organisms and methods of use described herein include, but are not limited to, GAPNs shown in Table 1 (or derivatives thereof).

TABLE 1

| | Donor Organism | Sequence code | SEQ ID NO. |
|---|---|---|---|
| 1 | Triticum aestivum | Q8LK61 | 262 |
| 2 | Chlamydomonas reinhardtii | A0A2K3D5S6 | 263 |
| 3 | Apium graveolens | Q9SNX8 | 264 |
| 4 | Cicer arietinum | A0A1S2YP36 | 265 |
| 5 | Bacillus pseudomycoides | A0A2C4I5G8 | 266 |
| 6 | Streptococcus equinus | Q3C1A6 | 267 |
| 7 | Glycine soja | A0A0B2QEZ3 | 268 |
| 8 | Streptococcus sp. DD12 | A0A139NKR4 | 269 |
| 9 | Bacillus thuringiensis | A0A0B5NZK7 | 270 |
| 10 | Arabidopsis thaliana | Q1WIQ6 | 271 |
| 11 | Bacillus litoralis | EFP8C9GVR | 272 |
| 12 | Streptococcus hyointestinalis | A0A380K8A8 | 273 |
| 13 | Zea mays | Q43272 | 274 |
| 14 | Lactobacillus delbrueckii | Q04A83 | 275 |
| 15 | Streptococcus pluranimalium | A0A2L0D390 | 276 |
| 16 | Nicotiana plumbaginifolia | P93338 | 277 |
| 17 | Streptococcus macacae | G5JUQ8 | 278 |
| 18 | Streptococcus mutans | Q59931 | 279 |
| 19 | Bacillus cereus | | 280 |
| 20 | Streptococcus thermophilus | | 289 |
| 21 | Streptococcus urinalis | | 290 |
| 22 | Streptococcus canis | | 291 |
| 23 | Streptococcus thoraltensis | | 292 |
| 24 | Streptococcus dysgalactiae | | 293 |
| 25 | Streptococcus pyogenes | | 294 |
| 26 | Streptococcus ictaluri | | 295 |
| 27 | Clostridium perfringens | | 296 |
| 28 | Clostridium chromiireducens | | 297 |
| 29 | Clostridium botulinum | | 298 |
| 30 | Bacillus anthracis | | 299 |
| 31 | Pyrococcus furiosus | | 300 |

[0153] Additional polynucleotides encoding suitable GAPNs may be derived from microorganisms of any suitable genus, including those readily available within the UniProtKB database.

[0154] The GAPN may be a bacterial transporter. For example, the GAPN may be derived from a Gram-positive bacterium such as a Bacillus, Clostridium, Enterococcus, Geobacillus, Lactobacillus, Lactococcus, Oceanobacillus, Staphylococcus, Streptococcus, or Streptomyces, or a Gram-negative bacterium such as a Campylobacter, E. coli, Flavobacterium, Fusobacterium, Helicobacter, Ilyobacter, Neisseria, Pseudomonas, Salmonella, or Ureaplasma.

[0155] In one embodiment, the GAPN is derived from Bacillus alkalophilus, Bacillus amyloliquefaciens, Bacillus brevis, Bacillus circulans, Bacillus clausii, Bacillus coagulans, Bacillus firmus, Bacillus lautus, Bacillus lentus, Bacillus licheniformis, Bacillus megaterium, Bacillus pumilus, Bacillus stearothermophilus, Bacillus subtilis, or Bacillus thuringiensis.

[0156] In another embodiment, the GAPN is derived from Streptococcus equisimilis, Streptococcus pyogenes, Streptococcus uberis, or Streptococcus equi subsp. Zooepidemicus.

[0157] In another embodiment, the GAPN is derived from Streptomyces achromogenes, Streptomyces avermitilis, Streptomyces coelicolor, Streptomyces griseus, or Streptomyces lividans.

[0158] The GAPN may be a fungal GAPN. For example, the GAPN may be derived from a yeast such as a Candida, Kluyveromyces, Pichia, Saccharomyces, Schizosaccharomyces, Yarrowia or Issatchenkia; or derived from a filamentous fungus such as an Acremonium, Agaricus, Alternaria, Aspergillus, Aureobasidium, Botryosphaeria, Ceriporiopsis, Chaetomidium, Chrysosporium, Claviceps, Cochliobolus, Coprinopsis, Coptotermes, Corynascus, Cryphonectria, Cryptococcus, Diplodia, Exidia, Filibasidium, Fusarium, Gibberella, Holomastigotoides, Humicola, Irpex, Lentinula, Leptospaeria, Magnaporthe, Melanocarpus, Meripilus, Mucor, Myceliophthora, Neocallimastix, Neurospora, Paecilomyces, Penicillium, Phanerochaete, Piromyces, Poitrasia, Pseudoplectania, Pseudotrichonympha, Rhizomucor, Schizophyllum, Scytalidium, Talaromyces, Thermoascus, Thielavia, Tolypocladium, Trichoderma, Trichophaea, Verticillium, Volvariella, or Xylaria.

[0159] In another embodiment, the GAPN is derived from Saccharomyces carlsbergensis, Saccharomyces cerevisiae, Saccharomyces diastaticus, Saccharomyces douglasii, Saccharomyces kluyveri, Saccharomyces norbensis, or Saccharomyces oviformis.

[0160] In another embodiment, the GAPN is derived from Acremonium cellulolyticus, Aspergillus aculeatus, Aspergillus awamori, Aspergillus foetidus, Aspergillus fumigatus, Aspergillus japonicus, Aspergillus nidulans, Aspergillus niger, Aspergillus oryzae, Chrysosporium inops, Chrysosporium keratinophilum, Chrysosporium lucknowense, Chrysosporium merdarium, Chrysosporium pannicola, Chrysosporium queenslandicum, Chrysosporium tropicum, Chrysosporium zonatum, Fusarium bactridioides, Fusarium cerealis, Fusarium crookwellense, Fusarium culmorum, Fusarium graminearum, Fusarium graminum, Fusarium heterosporum, Fusarium negundi, Fusarium oxysporum, Fusarium reticulatum, Fusarium roseum, Fusarium sambucinum, Fusarium sarcochroum, Fusarium sporotrichioides, Fusarium sulphureum, Fusarium torulosum, Fusarium trichothecioides, Fusarium venenatum, Humicola grisea, Humicola insolens, Humicola lanuginosa, lrpex lacteus, Mucor miehei, Myceliophthora thermophila, Neurospora crassa, Penicillium funiculosum, Penicillium purpurogenum, Phanerochaete chrysosporium, Thielavia achromatica, Thielavia albomyces, Thielavia albopilosa, Thielavia australeinsis, Thielavia fimeti, Thielavia microspora, Thielavia ovispora, Thielavia peruviana, Thielavia setosa, Thielavia spededonium, Thielavia subthermophila, Thielavia terrestris, Trichoderma harzianum, Trichoderma koningii, Trichoderma longibrachiatum, Trichoderma reesei, or Trichoderma viride.

[0161] It will be understood that for the aforementioned species, the invention encompasses both the perfect and imperfect states, and other taxonomic equivalents, e.g., anamorphs, regardless of the species name by which they are known. Those skilled in the art will readily recognize the identity of appropriate equivalents.

[0162] Strains of these species are readily accessible to the public in a number of culture collections, such as the American Type Culture Collection (ATCC), Deutsche Sammlung von Mikroorganismen and Zellkulturen GmbH (DSMZ), Centraalbureau Voor Schimmelcultures (CBS), and Agricultural Research Service Patent Culture Collection, Northern Regional Research Center (NRRL).

[0163] The GAPN coding sequences described or referenced herein, or a subsequence thereof, as well as the transporter described or referenced herein, or a fragment thereof, may be used to design nucleic acid probes to identify and clone DNA encoding a GAPN from strains of different genera or species according to methods well known in the art. In particular, such probes can be used for hybridization with the genomic DNA or cDNA of a cell of interest, following standard Southern blotting procedures, in order to identify and isolate the corresponding gene therein. Such probes can be considerably shorter than the entire sequence, but should be at least 15, e.g., at least 25, at least 35, or at least 70 nucleotides in length. Preferably, the nucleic acid probe is at least 100 nucleotides in length, e.g., at least 200 nucleotides, at least 300 nucleotides, at least 400 nucleotides, at least 500 nucleotides, at least 600 nucleotides, at least 700 nucleotides, at least 800 nucleotides, or at least 900 nucleotides in length. Both DNA and RNA probes can be used. The probes are typically labeled for detecting the corresponding gene (for example, with ³²P, ³H, ³⁵S, biotin, or avidin).

[0164] A genomic DNA or cDNA library prepared from such other strains may be screened for DNA that hybridizes with the probes described above and encodes a sugar transporter. Genomic or other DNA from such other strains may be separated by agarose or polyacrylamide gel electrophoresis, or other separation techniques. DNA from the libraries or the separated DNA may be transferred to and immobilized on nitrocellulose or other suitable carrier material. In order to identify a clone or DNA that hybridizes with a coding sequence, or a subsequence thereof, the carrier material is used in a Southern blot.

[0165] In one embodiment, the nucleic acid probe is a polynucleotide, or subsequence thereof, that encodes the GAPN of any one of SEQ ID NOs: 262-280 or 289-300, or a fragment thereof.

[0166] For purposes of the probes described above, hybridization indicates that the polynucleotide hybridizes to a labeled nucleic acid probe, or the full-length complementary strand thereof, or a subsequence of the foregoing; under very low to very high stringency conditions. Molecules to which the nucleic acid probe hybridizes under these conditions can be detected using, for example, X-ray film. Stringency and washing conditions are defined as described supra.

[0167] In one embodiment, the GAPN is encoded by a polynucleotide that hybridizes under at least low stringency conditions, e.g., medium stringency conditions, medium-high stringency conditions, high stringency conditions, or very high stringency conditions with the full-length complementary strand of the coding sequence for any one of the GAPNs described or referenced herein (e.g., SEQ ID NOs: 262-280 or 289-300). (Sambrook et al., 1989, Molecular Cloning, A Laboratory Manual, 2d edition, Cold Spring Harbor, New York).

[0168] The GAPN may also be identified and obtained from other sources including microorganisms isolated from nature (e.g., soil, composts, water, silage, etc.) or DNA samples obtained directly from natural materials (e.g., soil, composts, water, silage, etc.) using the above-mentioned probes. Techniques for isolating microorganisms and DNA directly from natural habitats are well known in the art. The polynucleotide encoding a GAPN may then be derived by similarly screening a genomic or cDNA library of another microorganism or mixed DNA sample.

[0169] Once a polynucleotide encoding a GAPN has been detected with a suitable probe as described herein, the sequence may be isolated or cloned by utilizing techniques that are known to those of ordinary skill in the art (See, e.g., Sambrook et al., 1989, supra). Techniques used to isolate or clone polynucleotides encoding GAPNs include isolation from genomic DNA, preparation from cDNA, or a combination thereof. The cloning of the polynucleotides from such genomic DNA can be affected, e.g., by using the well-known polymerase chain reaction (PCR) or antibody screening of expression libraries to detect cloned DNA fragments with shares structural features (See, e.g., Innis et al., 1990, PCR: A Guide to Methods and Application, Academic Press, New York). Other nucleic acid amplification procedures such as ligase chain reaction (LCR), ligated activated transcription (LAT) and nucleotide sequence-based amplification (NASBA) may be used.

[0170] In one embodiment, the GAPN comprises or consists of the amino acid sequence of any one of SEQ ID NOs: 262-280 or 289-300 (such as any one of SEQ ID NOs: 262, 263, 264, 265, 266, 267, 268, 269, 270, 271, 272, 273, 274, 275, 276, 277, 278, 279, 280, 289, 290, 291, 292, 293, 294, 295, 296, 297, 298, 299 and 300). In another embodiment, the transporter is a fragment of the GAPN of any one of SEQ ID NOs: 262-280 or 289-300 (such as any one of SEQ ID NOs: 262, 263, 264, 265, 266, 267, 268, 269, 270, 271, 272, 273, 274, 275, 276, 277, 278, 279, 280, 289, 290, 291, 292, 293, 294, 295, 296, 297, 298, 299 and 300), wherein, e.g., the fragment has GAPN activity. In one embodiment, the number of amino acid residues in the fragment is at least 75%, e.g., at least 80%, 85%, 90%, or 95% of the number of amino acid residues in referenced full length GAPN (e.g. any one of SEQ ID NOs: 262-280 or 289-300; such as any one of SEQ ID NOs: 262, 263, 264, 265, 266, 267, 268, 269, 270, 271, 272, 273, 274, 275, 276, 277, 278, 279, 280, 289, 290, 291, 292, 293, 294, 295, 296, 297, 298, 299 and 300). In other embodiments, the GAPN may comprise the catalytic domain of any GAPN described or referenced herein (e.g., the catalytic domain of any one of SEQ ID NOs: 262-280 or 289-300; such as any one of SEQ ID NOs: 262, 263, 264, 265, 266, 267, 268, 269, 270, 271, 272, 273, 274, 275, 276, 277, 278, 279, 280, 289, 290, 291, 292, 293, 294, 295, 296, 297, 298, 299 and 300).

[0171] The GAPN may be a variant of any one of the GAPNs described supra (e.g., any one of SEQ ID NOs: 262-280 or 289-300; such as any one of SEQ ID NOs: 262, 263, 264, 265, 266, 267, 268, 269, 270, 271, 272, 273, 274, 275, 276, 277, 278, 279, 280, 289, 290, 291, 292, 293, 294, 295, 296, 297, 298, 299 and 300). In one embodiment, the GAPN has at least 60%, e.g., at least 65%, 70%, 75%, 80%, 85%, 90%, 95%, 97%, 98%, 99%, or 100% sequence identity to any one of the GAPNs described supra (e.g., any one of SEQ ID NOs: 262-280 or 289-300; such as any one of SEQ ID NOs: 262, 263, 264, 265, 266, 267, 268, 269, 270, 271, 272, 273, 274, 275, 276, 277, 278, 279, 280, 289, 290, 291, 292, 293, 294, 295, 296, 297, 298, 299 and 300).

[0172] In one embodiment, the GAPN sequence differs by no more than ten amino acids, e.g., by no more than five amino acids, by no more than four amino acids, by no more than three amino acids, by no more than two amino acids, or by one amino acid from the amino acid sequence of any one of the GAPNs described supra (e.g., any one of SEQ ID NOs: 262-280 or 289-300; such as any one of SEQ ID NOs: 262, 263, 264, 265, 266, 267, 268, 269, 270, 271, 272, 273, 274, 275, 276, 277, 278, 279, 280, 289, 290, 291, 292, 293, 294, 295, 296, 297, 298, 299 and 300). In one embodiment, the GAPN has an amino acid substitution, deletion, and/or insertion of one or more (e.g., two, several) of amino acid sequence of any one of the GAPNs described supra (e.g., any one of SEQ ID NOs: 262-280 or 289-300; such as any one of SEQ ID NOs: 262, 263, 264, 265, 266, 267, 268, 269, 270, 271, 272, 273, 274, 275, 276, 277, 278, 279, 280, 289, 290, 291, 292, 293, 294, 295, 296, 297, 298, 299 and 300). In some embodiments, the total number of amino acid substitutions, deletions and/or insertions is not more than 10, e.g., not more than 9, 8, 7, 6, 5, 4, 3, 2, or 1.

[0173] The amino acid changes are generally of a minor nature, that is conservative amino acid substitutions or insertions that do not significantly affect the folding and/or activity of the protein; small deletions, typically of one to about 30 amino acids; small amino-terminal or carboxyl-terminal extensions, such as an amino-terminal methionine residue; a small linker peptide of up to about 20-25 residues; or a small extension that facilitates purification by changing net charge or another function, such as a poly-histidine tract, an antigenic epitope or a binding domain.

[0174] Examples of conservative substitutions are within the group of basic amino acids (arginine, lysine and histidine), acidic amino acids (glutamic acid and aspartic acid), polar amino acids (glutamine and asparagine), hydrophobic amino acids (leucine, isoleucine and valine), aromatic amino acids (phenylalanine, tryptophan and tyrosine), and small amino acids (glycine, alanine, serine, threonine and methionine). Amino acid substitutions that do not generally alter specific activity are known in the art and are described, for example, by H. Neurath and R.L. Hill, 1979, In, The Proteins, Academic Press, New York. The most commonly occurring exchanges are Ala/Ser, Val/Ile, Asp/Glu, Thr/Ser, Ala/Gly, Ala/Thr, Ser/Asn, Ala/Val, Ser/Gly, Tyr/Phe, Ala/Pro, Lys/Arg, Asp/Asn, Leu/Ile, Leu/Val, Ala/Glu, and Asp/Gly.

[0175] Alternatively, the amino acid changes are of such a nature that the physico-chemical properties of the polypeptides are altered. For example, amino acid changes may improve the thermal stability of the GAPNs, alter the substrate specificity, change the pH optimum, and the like.

[0176] Essential amino acids can be identified according to procedures known in the art, such as site-directed mutagenesis or alanine-scanning mutagenesis (Cunningham and Wells, 1989, Science 244: 1081-1085). In the latter technique, single alanine mutations are introduced at every residue in the molecule, and the resultant mutant molecules are tested for activity to identify amino acid residues that are critical to the activity of the molecule. See also, Hilton et al., 1996, J. Biol. Chem. 271: 4699-4708. The active site or other biological interaction can also be determined by physical analysis of structure, as determined by such techniques as nuclear magnetic resonance, crystallography, electron diffraction, or photoaffinity labeling, in conjunction with mutation of putative contact site amino acids (See, for example, de Vos et al., 1992, Science 255: 306-312; Smith et al., 1992, J. Mol. Biol. 224: 899-904; Wlodaver et al., 1992, FEBS Lett. 309: 59-64). The identities of essential amino acids can also be inferred from analysis of identities with other GAPNs that are related to the referenced GAPN.

[0177] Additional guidance on the structure-activity relationship of the GAPNs herein can be determined using multiple sequence alignment (MSA) techniques well-known in the art. Based on the teachings herein, the skilled artisan could make similar alignments with any number of GAPNs described herein or known in the art. Such alignments aid the skilled artisan to determine potentially relevant domains (e.g., binding domains or catalytic domains), as well as which amino acid residues are conserved and not conserved among the different transporter sequences. It is appreciated in the art that changing an amino acid that is conserved at a particular position between disclosed polypeptides will more likely result in a change in biological activity (Bowie et al., 1990, Science 247: 1306-1310: “Residues that are directly involved in protein functions such as binding or catalysis will certainly be among the most conserved”). In contrast, substituting an amino acid that is not highly conserved among the polypeptides will not likely or significantly alter the biological activity.

[0178] Even further guidance on the structure-activity relationship of GAPNs for the skilled artisan can be found in published x-ray crystallography studies known in the art (e.g., Cobessi et al., 1999, J. Mol. Biol. 290: 161-173).

[0179] Single or multiple amino acid substitutions, deletions, and/or insertions can be made and tested using known methods of mutagenesis, recombination, and/or shuffling, followed by a relevant screening procedure, such as those disclosed by Reidhaar-Olson and Sauer, 1988, Science 241: 53-57; Bowie and Sauer, 1989, Proc. Natl. Acad. Sci. USA 86: 2152-2156; WO95/17413; or WO95/22625. Other methods that can be used include error-prone PCR, phage display (e.g., Lowman et al., 1991, Biochemistry 30: 10832-10837; U.S. Pat. No. 5,223,409; WO92/06204), and region-directed mutagenesis (Derbyshire et al., 1986, Gene 46: 145; Ner et al., 1988, DNA 7: 127).

[0180] Mutagenesis/shuffling methods can be combined with high-throughput, automated screening methods to detect activity of cloned, mutagenized polypeptides expressed by host cells (Ness et al., 1999, Nature Biotechnology 17: 893-896). Mutagenized DNA molecules that encode active GAPNs can be recovered from the host cells and rapidly sequenced using standard methods in the art. These methods allow the rapid determination of the importance of individual amino acid residues in a polypeptide.

[0181] In another embodiment, the heterologous polynucleotide encoding the GAPN comprises a coding sequence having at least 60%, e.g., at least 65%, at least 70%, at least 75%, at least 80%, at least 85%, at least 90%, at least 95%, at least 96%, at least 97%, at least 98%, at least 99%, or 100% sequence identity to the coding sequence of any one of the GAPNs described supra (e.g., any one of SEQ ID NOs: 262-280 or 289-300; such as any one of SEQ ID NOs: 262, 263, 264, 265, 266, 267, 268, 269, 270, 271, 272, 273, 274, 275, 276, 277, 278, 279, 280, 289, 290, 291, 292, 293, 294, 295, 296, 297, 298, 299 and 300).

[0182] In one embodiment, the heterologous polynucleotide encoding the GAPN comprises or consists of the coding sequence of any one of the GAPNs described supra (e.g., any one of SEQ ID NOs: 262-280 or 289-300; such as any one of SEQ ID NOs: 262, 263, 264, 265, 266, 267, 268, 269, 270, 271, 272, 273, 274, 275, 276, 277, 278, 279, 280, 289, 290, 291, 292, 293, 294, 295, 296, 297, 298, 299 and 300). In another embodiment, the heterologous polynucleotide encoding the GAPN comprises a subsequence of the coding sequence of any one of the GAPNs described supra (e.g., any one of SEQ ID NOs: 262-280 or 289-300; such as any one of SEQ ID NOs: 262, 263, 264, 265, 266, 267, 268, 269, 270, 271, 272, 273, 274, 275, 276, 277, 278, 279, 280, 289, 290, 291, 292, 293, 294, 295, 296, 297, 298, 299 and 300) wherein the subsequence encodes a polypeptide having GAPN activity. In another embodiment, the number of nucleotides residues in the coding subsequence is at least 75%, e.g., at least 80%, 85%, 90%, or 95% of the number of the referenced coding sequence.

[0183] The referenced coding sequence of any related aspect or embodiment described herein can be the native coding sequence or a degenerate sequence, such as a codon-optimized coding sequence designed for use in a particular host cell (e.g., optimized for expression in Saccharomyces cerevisiae). Codon-optimization for expression in yeast cells is known in the art (e.g., U.S. Pat. No. 8,326,547).

[0184] The GAPN may be a fused polypeptide or cleavable fusion polypeptide in which another polypeptide is fused at the N-terminus or the C-terminus of the GAPN. A fused polypeptide may be produced by fusing a polynucleotide encoding another polypeptide to a polynucleotide encoding the GAPN. Techniques for producing fusion polypeptides are known in the art, and include ligating the coding sequences encoding the polypeptides so that they are in frame and that expression of the fused polypeptide is under control of the same promoter(s) and terminator. Fusion proteins may also be constructed using intein technology in which fusions are created post-translationally (Cooper et al., 1993, EMBO J. 12: 2575-2583; Dawson et al., 1994, Science 266: 776-779).

[0185] In some embodiments, the GAPN is a fusion protein comprising a signal peptide linked to the N-terminus of a mature polypeptide, such as any signal sequences described in U.S. Provisional Application No. 62/883,519 filed Aug. 6, 2019 and entitled “Fusion Proteins For Improved Enzyme Expression” (the content of which is hereby incorporated by reference).

[0186] Active Pentose Fermentation Pathway

[0187] The host cells or fermenting organisms described herein (e.g., yeast cells) may comprise an active pentose fermentation pathway, such as an active xylose fermentation pathway and/or and active arabinose fermentation pathway as described in more detail below. Pentose fermentation pathways and pathway genes and corresponding engineered transformants for fermentation of pentose (e.g., xylose, arabinose) are known in the art.

[0188] Any suitable pentose fermentation pathway gene, endogenous or heterologous, may be used and expressed in sufficient amount to produce an enzyme involved in a selected pentose fermentation pathway. With the complete genome sequence available for now numerous microorganism genomes and a variety of yeast, fungi, plant, and mammalian genomes, the identification of genes encoding the selected pentose fermentation pathway enzymatic activities taught herein is routine and well known in the art for a selected host. For example, suitable homologues, orthologs, paralogs and nonorthologous gene displacements of known genes, and the interchange of genetic alterations between organisms can be identified in related or distant host to a selected host.

[0189] For host cells without a known genome sequence, sequences for genes of interest (either as overexpression candidates or as insertion sites) can typically be obtained using techniques known in the art. Routine experimental design can be employed to test expression of various genes and activity of various enzymes, including genes and enzymes that function in a pentose fermentation pathway. Experiments may be conducted wherein each enzyme is expressed in the cell individually and in blocks of enzymes up to and including preferably all pathway enzymes, to establish which are needed (or desired) for improved pentose fermentation. One illustrative experimental design tests expression of each individual enzyme as well as of each unique pair of enzymes, and further can test expression of all required enzymes, or each unique combination of enzymes. A number of approaches can be taken, as will be appreciated.

[0190] The host cells of the invention can be produced by introducing heterologous polynucleotides encoding one or more of the enzymes participating in an active pentose fermentation pathway, as described below. As one in the art will appreciate, in some instances (e.g., depending on the selection of host) the heterologous expression of every gene shown in the active pentose fermentation may not be required since a host cell may have endogenous enzymatic activity from one or more pathway genes. For example, if a chosen host is deficient in one or more enzymes of an active pentose fermentation pathway, then heterologous polynucleotides for the deficient enzyme(s) are introduced into the host for subsequent expression. Alternatively, if the chosen host exhibits endogenous expression of some pathway genes, but is deficient in others, then an encoding polynucleotide is needed for the deficient enzyme(s) to achieve pentose fermentation. Thus, a recombinant host cell of the invention can be produced by introducing heterologous polynucleotides to obtain the enzyme activities of a desired biosynthetic pathway or a desired biosynthetic pathway can be obtained by introducing one or more heterologous polynucleotides that, together with one or more endogenous enzymes, produces a desired product such as ethanol.

[0191] Depending on the pentose fermentation pathway constituents of a selected recombinant host organism, the host cells of the invention will include at least one heterologous polynucleotide and optionally up to all encoding heterologous polynucleotides for the pentose fermentation pathway. For example, pentose fermentation can be established in a host deficient in a pentose fermentation pathway enzyme through heterologous expression of the corresponding polynucleotide. In a host deficient in all enzymes of a pentose fermentation pathway, heterologous expression of all enzymes in the pathway can be included, although it is understood that all enzymes of a pathway can be expressed even if the host contains at least one of the pathway enzymes.

[0192] The enzymes of the selected active pentose fermentation pathway, and activities thereof, can be detected using methods known in the art or as described herein. These detection methods may include use of specific antibodies, formation of an enzyme product, or disappearance of an enzyme substrate. See, for example, Sambrook et al., Molecular Cloning: A Laboratory Manual, Third Ed., Cold Spring Harbor Laboratory, New York (2001); Ausubel et al., Current Protocols in Molecular Biology, John Wiley and Sons, Baltimore, Md. (1999); and Hanai et al., Appl. Environ. Microbiol. 73:7814-7818 (2007)).

[0193] The active pentose fermentation pathway may be an active xylose fermentation pathway. Exemplary xylose fermentation pathways are known in the art (e.g., WO2003/062430, WO2003/078643, WO2004/067760, WO2006/096130, WO2009/017441, WO2010/059095, WO2011/059329, WO2011/123715, WO2012/113120, WO2012/135110, WO2013/081700, WO2018/112638 and US2017/088866). Any xylose fermentation pathway or gene thereof described in the foregoing references is incorporated herein by reference for use in Applicant's active xylose fermentation pathway. FIG. 3 shows conversion of D-xylose to D-xylulose 5-phosphate, which is then fermented to ethanol via the pentose phosphate pathway. The oxido-reductase pathway uses an aldolase reductase (AR, such as xylose reductase (XR)) to reduce D-xylose to xylitol followed by oxidation of xylitol to D-xylulose with xylitol dehydrogenase (XDH; also known as D-xylulose reductase). The isomerase pathway uses xylose isomerase (XI) to convert D-xylose into D-xylulose. D-xylulose is then converted to D-xylulose-5-phosphate with xylulokinase (XK)

[0194] In one embodiment, the host cell or fermenting organism (e.g., yeast cell) further comprises a heterologous polynucleotide encoding a xylose isomerase (XI). The xylose isomerase may be any xylose isomerase that is suitable for the host cells and the methods described herein, such as a naturally occurring xylose isomerase or a variant thereof that retains xylose isomerase activity. In one embodiment, the xylose isomerase is present in the cytosol of the host cells.

[0195] In some embodiments, the host cell or fermenting organism comprising a heterologous polynucleotide encoding a xylose isomerase has an increased level of xylose isomerase activity compared to the host cells without the heterologous polynucleotide encoding the xylose isomerase, when cultivated under the same conditions. In some embodiments, the host cells or fermenting organisms have an increased level of xylose isomerase activity of at least 5%, e.g., at least 10%, at least 15%, at least 20%, at least 25%, at least 50%, at least 100%, at least 150%, at least 200%, at least 300%, or at 500% compared to the host cells without the heterologous polynucleotide encoding the xylose isomerase, when cultivated under the same conditions.

[0196] Exemplary xylose isomerases that can be used with the recombinant host cells and methods of use described herein include, but are not limited to, Xls from the fungus Piromyces sp. (WO2003/062430) or other sources (Madhavan et al., 2009, Appl Microbiol Biotechnol. 82(6), 1067-1078) have been expressed in S. cerevisiae host cells. Still other XIs suitable for expression in yeast have been described in US 2012/0184020 (an XI from Ruminococcus flavefaciens), WO2011/078262 (several XIs from Reticulitermes speratus and Mastotermes darwiniensis) and WO2012/009272 (constructs and fungal cells containing an XI from Abiotrophia defectiva). U.S. Pat. No. 8,586,336 describes a S. cerevisiae host cell expressing an XI obtained by bovine rumen fluid (shown herein as SEQ ID NO: 74).

[0197] Additional polynucleotides encoding suitable xylose isomerases may be obtained from microorganisms of any genus, including those readily available within the UniProtKB database. In one embodiment, the xylose isomerases is a bacterial, a yeast, or a filamentous fungal xylose isomerase, e.g., obtained from any of the microorganisms described or referenced herein, as described supra.

[0198] The xylose isomerase coding sequences can also be used to design nucleic acid probes to identify and clone DNA encoding xylose isomerases from strains of different genera or species, as described supra.

[0199] The polynucleotides encoding xylose isomerases may also be identified and obtained from other sources including microorganisms isolated from nature (e.g., soil, composts, water, etc.) or DNA samples obtained directly from natural materials (e.g., soil, composts, water, etc.) as described supra.

[0200] Techniques used to isolate or clone polynucleotides encoding xylose isomerases are described supra.

[0201] In one embodiment, the xylose isomerase has a mature polypeptide sequence of having at least 60%, e.g., at least 65%, at least 70%, at least 75%, at least 80%, at least 85%, at least 90%, at least 91%, at least 92%, at least 93%, at least 94%, at least 95%, at least 96%, at least 97%, at least 98%, at least 99%, or 100% sequence identity to any xylose isomerase described or referenced herein (e.g., the xylose isomerase of SEQ ID NO: 74). In one embodiment, the xylose isomerase has a mature polypeptide sequence that differs by no more than ten amino acids, e.g., by no more than five amino acids, by no more than four amino acids, by no more than three amino acids, by no more than two amino acids, or by one amino acid from any xylose isomerase described or referenced herein (e.g., the xylose isomerase of SEQ ID NO: 74). In one embodiment, the xylose isomerase has a mature polypeptide sequence that comprises or consists of the amino acid sequence of any xylose isomerase described or referenced herein (e.g., the xylose isomerase of SEQ ID NO: 74), allelic variant, or a fragment thereof having xylose isomerase activity. In one embodiment, the xylose isomerase has an amino acid substitution, deletion, and/or insertion of one or more (e.g., two, several) amino acids. In some embodiments, the total number of amino acid substitutions, deletions and/or insertions is not more than 10, e.g., not more than 9, 8, 7, 6, 5, 4, 3, 2, or 1.

[0202] In some embodiments, the xylose isomerase has at least 20%, e.g., at least 40%, at least 50%, at least 60%, at least 70%, at least 80%, at least 90%, at least 95%, at least 96%, at least 97%, at least 98%, at least 99%, or 100% of the xylose isomerase activity of any xylose isomerase described or referenced herein (e.g., the xylose isomerase of SEQ ID NO: 74) under the same conditions.

[0203] In one embodiment, the xylose isomerase coding sequence hybridizes under at least low stringency conditions, e.g., medium stringency conditions, medium-high stringency conditions, high stringency conditions, or very high stringency conditions with the full-length complementary strand of the coding sequence from any xylose isomerase described or referenced herein (e.g., the xylose isomerase of SEQ ID NO: 74). In one embodiment, the xylose isomerase coding sequence has at least 65%, e.g., at least 70%, at least 75%, at least 80%, at least 85%, at least 85%, at least 90%, at least 91%, at least 92%, at least 93%, at least 94%, at least 95%, at least 96%, at least 97%, at least 98%, at least 99%, or 100% sequence identity with the coding sequence from any xylose isomerase described or referenced herein (e.g., the xylose isomerase of SEQ ID NO: 74).

[0204] In one embodiment, the heterologous polynucleotide encoding the xylose isomerase comprises the coding sequence of any xylose isomerase described or referenced herein (e.g., the xylose isomerase of SEQ ID NO: 74). In one embodiment, the heterologous polynucleotide encoding the xylose isomerase comprises a subsequence of the coding sequence from any xylose isomerase described or referenced herein, wherein the subsequence encodes a polypeptide having xylose isomerase activity. In one embodiment, the number of nucleotides residues in the subsequence is at least 75%, e.g., at least 80%, 85%, 90%, or 95% of the number of the referenced coding sequence.

[0205] The xylose isomerases can also include fused polypeptides or cleavable fusion polypeptides, as described supra.

[0206] In one embodiment, the host cell or fermenting organism (e.g., yeast cell) further comprises a heterologous polynucleotide encoding a xylulokinase (XK). A xylulokinase, as used herein, provides enzymatic activity for converting D-xylulose to xylulose 5-phosphate. The xylulokinase may be any xylulokinase that is suitable for the host cells and the methods described herein, such as a naturally occurring xylulokinase or a variant thereof that retains xylulokinase activity. In one embodiment, the xylulokinase is present in the cytosol of the host cells.

[0207] In some embodiments, the host cells or fermenting organisms comprising a heterologous polynucleotide encoding a xylulokinase have an increased level of xylulokinase activity compared to the host cells without the heterologous polynucleotide encoding the xylulokinase, when cultivated under the same conditions. In some embodiments, the host cells have an increased level of xylose isomerase activity of at least 5%, e.g., at least 10%, at least 15%, at least 20%, at least 25%, at least 50%, at least 100%, at least 150%, at least 200%, at least 300%, or at 500% compared to the host cells without the heterologous polynucleotide encoding the xylulokinase, when cultivated under the same conditions.

[0208] Exemplary xylulokinases that can be used with the host cells and fermenting organisms, and methods of use described herein include, but are not limited to, the Saccharomyces cerevisiae xylulokinase of SEQ ID NO: 75. Additional polynucleotides encoding suitable xylulokinases may be obtained from microorganisms of any genus, including those readily available within the UniProtKB database. In one embodiment, the xylulokinases is a bacterial, a yeast, or a filamentous fungal xylulokinase, e.g., obtained from any of the microorganisms described or referenced herein, as described supra.

[0209] The xylulokinase coding sequences can also be used to design nucleic acid probes to identify and clone DNA encoding xylulokinases from strains of different genera or species, as described supra.

[0210] The polynucleotides encoding xylulokinases may also be identified and obtained from other sources including microorganisms isolated from nature (e.g., soil, composts, water, etc.) or DNA samples obtained directly from natural materials (e.g., soil, composts, water, etc.) as described supra.

[0211] Techniques used to isolate or clone polynucleotides encoding xylulokinases are described supra.

[0212] In one embodiment, the xylulokinase has a mature polypeptide sequence of at least 60%, e.g., at least 65%, at least 70%, at least 75%, at least 80%, at least 85%, at least 90%, at least 91%, at least 92%, at least 93%, at least 94%, at least 95%, at least 96%, at least 97%, at least 98%, at least 99%, or 100% sequence identity to any xylulokinase described or referenced herein (e.g., the Saccharomyces cerevisiae xylulokinase of SEQ ID NO: 75). In one embodiment, the xylulokinase has a mature polypeptide sequence that differs by no more than ten amino acids, e.g., by no more than five amino acids, by no more than four amino acids, by no more than three amino acids, by no more than two amino acids, or by one amino acid from any xylulokinase described or referenced herein (e.g., the Saccharomyces cerevisiae xylulokinase of SEQ ID NO: 75). In one embodiment, the xylulokinase has a mature polypeptide sequence that comprises or consists of the amino acid sequence of any xylulokinase described or referenced herein (e.g., the Saccharomyces cerevisiae xylulokinase of SEQ ID NO: 75), allelic variant, or a fragment thereof having xylulokinase activity. In one embodiment, the xylulokinase has an amino acid substitution, deletion, and/or insertion of one or more (e.g., two, several) amino acids. In some embodiments, the total number of amino acid substitutions, deletions and/or insertions is not more than 10, e.g., not more than 9, 8, 7, 6, 5, 4, 3, 2, or 1.

[0213] In some embodiments, the xylulokinase has at least 20%, e.g., at least 40%, at least 50%, at least 60%, at least 70%, at least 80%, at least 90%, at least 95%, at least 96%, at least 97%, at least 98%, at least 99%, or 100% of the xylulokinase activity of any xylulokinase described or referenced herein (e.g., the Saccharomyces cerevisiae xylulokinase of SEQ ID NO: 75) under the same conditions.

[0214] In one embodiment, the xylulokinase coding sequence hybridizes under at least low stringency conditions, e.g., medium stringency conditions, medium-high stringency conditions, high stringency conditions, or very high stringency conditions with the full-length complementary strand of the coding sequence from any xylulokinase described or referenced herein (e.g., the Saccharomyces cerevisiae xylulokinase of SEQ ID NO: 75). In one embodiment, the xylulokinase coding sequence has at least 65%, e.g., at least 70%, at least 75%, at least 80%, at least 85%, at least 85%, at least 90%, at least 91%, at least 92%, at least 93%, at least 94%, at least 95%, at least 96%, at least 97%, at least 98%, at least 99%, or 100% sequence identity with the coding sequence from any xylulokinase described or referenced herein (e.g., the Saccharomyces cerevisiae xylulokinase of SEQ ID NO: 75).

[0215] In one embodiment, the heterologous polynucleotide encoding the xylulokinase comprises the coding sequence of any xylulokinase described or referenced herein (e.g., the Saccharomyces cerevisiae xylulokinase of SEQ ID NO: 75). In one embodiment, the heterologous polynucleotide encoding the xylulokinase comprises a subsequence of the coding sequence from any xylulokinase described or referenced herein, wherein the subsequence encodes a polypeptide having xylulokinase activity. In one embodiment, the number of nucleotides residues in the subsequence is at least 75%, e.g., at least 80%, 85%, 90%, or 95% of the number of the referenced coding sequence.

[0216] The xylulokinases can also include fused polypeptides or cleavable fusion polypeptides, as described supra.

[0217] In one embodiment, the host cell or fermenting organism (e.g., yeast cell) further comprises a heterologous polynucleotide encoding a ribulose 5 phosphate 3-epimerase (RPE1). A ribulose 5 phosphate 3-epimerase, as used herein, provides enzymatic activity for converting L-ribulose 5-phosphate to L-xylulose 5-phosphate (EC 5.1.3.22). The RPE1 may be any RPE1 that is suitable for the host cells and the methods described herein, such as a naturally occurring RPE1 or a variant thereof that retains RPE1 activity. In one embodiment, the RPE1 is present in the cytosol of the host cells.

[0218] In one embodiment, the recombinant cell comprises a heterologous polynucleotide encoding a ribulose 5 phosphate 3-epimerase (RPE1), wherein the RPE1 is Saccharomyces cerevisiae RPE1, or an RPE1 having at least 60%, e.g., at least 65%, 70%, 75%, 80%, 85%, 90%, 95%, 97%, 98%, 99%, or 100% sequence identity to a Saccharomyces cerevisiae RPE1.

[0219] In one embodiment, the host cell or fermenting organism (e.g., yeast cell) further comprises a heterologous polynucleotide encoding a ribulose 5 phosphate isomerase (RKI1). A ribulose 5 phosphate isomerase, as used herein, provides enzymatic activity for converting ribose-5-phophate to ribulose 5-phosphate. The RKI1 may be any RKI1 that is suitable for the host cells and the methods described herein, such as a naturally occurring RKI1 or a variant thereof that retains RKI1 activity. In one embodiment, the RKI1 is present in the cytosol of the host cells.

[0220] In one embodiment, the host cell or fermenting organism comprises a heterologous polynucleotide encoding a ribulose 5 phosphate isomerase (RKI1), wherein the RKI1 is a Saccharomyces cerevisiae RKI1, or an RKI1 having a mature polypeptide sequence of at least 60%, e.g., at least 65%, 70%, 75%, 80%, 85%, 90%, 95%, 97%, 98%, 99%, or 100% sequence identity to a Saccharomyces cerevisiae RKI1.

[0221] In one embodiment, the host cell or fermenting organism (e.g., yeast cell) further comprises a heterologous polynucleotide encoding a transketolase (TKL1). The TKL1 may be any TKL1 that is suitable for the host cells and the methods described herein, such as a naturally occurring TKL1 or a variant thereof that retains TKL1 activity. In one embodiment, the TKL1 is present in the cytosol of the host cells.

[0222] In one embodiment, the host cell or fermenting organism comprises a heterologous polynucleotide encoding a transketolase (TKL1), wherein the TKL1 is a Saccharomyces cerevisiae TKL1, or a TKL1 having a mature polypeptide sequence of at least 60%, e.g., at least 65%, 70%, 75%, 80%, 85%, 90%, 95%, 97%, 98%, 99%, or 100% sequence identity to a Saccharomyces cerevisiae TKL1.

[0223] In one embodiment, the host cell or fermenting organism (e.g., yeast cell) further comprises a heterologous polynucleotide encoding a transaldolase (TAL1). The TAL1 may be any TAL1 that is suitable for the host cells and the methods described herein, such as a naturally occurring TAL1 or a variant thereof that retains TAL1 activity. In one embodiment, the TAL1 is present in the cytosol of the host cells.

[0224] In one embodiment, the host cell or fermenting organism comprises a heterologous polynucleotide encoding a transketolase (TAL1), wherein the TAL1 is a Saccharomyces cerevisiae TAL1, or a TAL1 having a mature polypeptide sequence of at least 60%, e.g., at least 65%, 70%, 75%, 80%, 85%, 90%, 95%, 97%, 98%, 99%, or 100% sequence identity to a Saccharomyces cerevisiae TAL1.

[0225] The active pentose fermentation pathway may be an active arabinose fermentation pathway. Exemplary arabinose fermentation pathways are known in the art (e.g., WO2002/066616; WO2003/095627; WO2007/143245; WO2008/041840; WO2009/011591; WO2010/151548; WO2011/003893; WO2011/131674; WO2012/143513; US2012/225464; U.S. Pat. No. 7,977,083). Any arabinose fermentation pathway or gene thereof described in the foregoing references is incorporated herein by reference for use in Applicant's active xylose fermentation pathway. FIG. 2 shows arabinose fermentation pathways from L-arabinose to D-xylulose 5-phosphate, which is then fermented to ethanol via the pentose phosphate pathway. The bacterial pathway utilizes genes L-arabinose isomerase (AI, such as araA), L-ribulokinase (RK, such as araB), and L-ribulose-5-P4-epimerase (RSPE, such as araD) to convert L-arabinose to D-xylulose 5-phosphate. The fungal pathway proceeds using aldose reductase (AR), L-arabinitol 4-dehydrogenase (LAD), L-xylulose reductase (LXR), xylitol dehydrogenase (XDH, also known as D-xylulose reductase) and xylulokinase (XK).

[0226] In one aspect, the recombinant cells described herein (e.g., a cell comprising a heterologous polynucleotide encoding a GAPN) have improved anaerobic growth on a pentose (e.g., xylose and/or arabinose). In one embodiment, the recombinant cell is capable of higher anaerobic growth rate on a pentose (e.g., xylose and/or arabinose) compared to the same cell without the heterologous polynucleotide encoding a GAPN (e.g., under conditions described in Example 2 of U.S. Provisional Application 62/946,359, filed Dec. 10, 2019).

[0227] In one aspect, the recombinant cells described herein (e.g., a cell comprising a heterologous polynucleotide encoding a GAPN) have improved rate of pentose consumption (e.g., xylose and/or arabinose). In one embodiment, the recombinant cell is capable of higher rate of pentose consumption (e.g., xylose and/or arabinose) compared to the same cell without the heterologous polynucleotide encoding a GAPN (e.g., under conditions described in Example 2). In one embodiment, the rate of pentose consumption (e.g., xylose and/or arabinose) is at least 5%, e.g., at least 10%, 15%, 20%, 25%, 30%, 35%, 40%, 45%, 50%, 60%, 75% or 90% higher compared to the same cell without the heterologous polynucleotide encoding a GAPN (e.g., under conditions described in Example 2 of U.S. Provisional Application 62/946,359, filed Dec. 10, 2019).

[0228] In one aspect, the recombinant cells described herein (e.g., a cell comprising a heterologous polynucleotide encoding a GAPN described herein) have higher pentose (e.g., xylose and/or arabinose) consumption. In one embodiment, the recombinant cell is capable of higher pentose (e.g., xylose and/or arabinose) consumption compared to the same cell without the heterologous polynucleotide encoding a GAPN at about or after 120 hours fermentation (e.g., under conditions described in Example 2 of U.S. Provisional Application 62/946,359, filed Dec. 10, 2019). In one embodiment, the recombinant cell is capable of consuming more than 65%, e.g., at least 70%, 75%, 80%, 85%, 90%, 95% of pentose (e.g., xylose and/or arabinose) in the medium at about or after 120 hours fermentation (e.g., under conditions described in Example 2 of U.S. Provisional Application 62/946,359, filed Dec. 10, 2019).

[0229] Glucoamylases

[0230] The host cells and fermenting organisms may express a heterologous glucoamylase. The glucoamylase can be any glucoamylase that is suitable for the host cells, fermenting organisms and/or their methods of use described herein, such as a naturally occurring glucoamylase or a variant thereof that retains glucoamylase activity. Any glucoamylase contemplated for expression by a host cell or fermenting organism described below is also contemplated for embodiments of the invention involving exogenous addition of a glucoamylase (e.g., added before, during or after liquefaction and/or saccharification).

[0231] In some embodiments, the host cell or fermenting organism comprises a heterologous polynucleotide encoding a glucoamylase, for example, as described in WO2017/087330, the content of which is hereby incorporated by reference. Any glucoamylase described or referenced herein is contemplated for expression in the host cell or fermenting organism.

[0232] In some embodiments, the host cell or fermenting organism comprising a heterologous polynucleotide encoding a glucoamylase has an increased level of glucoamylase activity compared to the host cells without the heterologous polynucleotide encoding the glucoamylase, when cultivated under the same conditions. In some embodiments, the host cell or fermenting organism has an increased level of glucoamylase activity of at least 5%, e.g., at least 10%, at least 15%, at least 20%, at least 25%, at least 50%, at least 100%, at least 150%, at least 200%, at least 300%, or at 500% compared to the host cell or fermenting organism without the heterologous polynucleotide encoding the glucoamylase, when cultivated under the same conditions.

[0233] Exemplary glucoamylases that can be used with the host cells and/or the methods described herein include bacterial, yeast, or filamentous fungal glucoamylases, e.g., obtained from any of the microorganisms described or referenced herein, as described supra.

[0234] Preferred glucoamylases are of fungal or bacterial origin, selected from the group consisting of Aspergillus glucoamylases, in particular Aspergillus niger G1 or G2 glucoamylase (Boel et al. (1984), EMBO J. 3 (5), p. 1097-1102), or variants thereof, such as those disclosed in WO 92/00381, WO 00/04136 and WO 01/04273 (from Novozymes, Denmark); the A. awamori glucoamylase disclosed in WO 84/02921, Aspergillus oryzae glucoamylase (Agric. Biol. Chem. (1991), 55 (4), p. 941-949), or variants or fragments thereof. Other Aspergillus glucoamylase variants include variants with enhanced thermal stability: G137A and G139A (Chen et al. (1996), Prot. Eng. 9, 499-505); D257E and D293E/Q (Chen et al. (1995), Prot. Eng. 8, 575-582); N182 (Chen et al. (1994), Biochem. J. 301, 275-281); disulphide bonds, A246C (Fierobe et al. (1996), Biochemistry, 35, 8698-8704; and introduction of Pro residues in position A435 and S436 (Li et al. (1997), Protein Eng. 10, 1199-1204.

[0235] Other glucoamylases include Athelia rolfsii (previously denoted Corticium rolfsii) glucoamylase (see U.S. Pat. No. 4,727,026 and (Nagasaka et al. (1998) “Purification and properties of the raw-starch-degrading glucoamylases from Corticium rolfsii, Appl Microbiol Biotechnol 50:323-330), Talaromyces glucoamylases, in particular derived from Talaromyces emersonii (WO 99/28448), Talaromyces leycettanus (US patent no. Re. 32,153), Talaromyces duponti, Talaromyces thermophilus (U.S. Pat. No. 4,587,215). In one embodiment, the glucoamylase used during saccharification and/or fermentation is the Talaromyces emersonii glucoamylase disclosed in WO 99/28448 or the Talaromyces emersonii glucoamylase of SEQ ID NO: 247.

[0236] Bacterial glucoamylases contemplated include glucoamylases from the genus Clostridium, in particular C. thermoamylolyticum (EP 135,138), and C. thermohydrosulfuricum (WO 86/01831).

[0237] Contemplated fungal glucoamylases include Trametes cingulate, Pachykytospora papyracea; and Leucopaxillus giganteus all disclosed in WO2006/069289; or Peniophora rufomarginata disclosed in WO2007/124285; or a mixture thereof. Also hybrid glucoamylase are contemplated. Examples include the hybrid glucoamylases disclosed in WO2005/045018.

[0238] In one embodiment, the glucoamylase is derived from a strain of the genus Pycnoporus, in particular a strain of Pycnoporus as described in WO2011/066576 (SEQ ID NO: 2, 4 or 6 therein), including the Pycnoporus sanguineus glucoamylase, or from a strain of the genus Gloeophyllum, such as a strain of Gloeophyllum sepiarium or Gloeophyllum trabeum, in particular a strain of Gloeophyllum as described in WO2011/068803 (SEQ ID NO: 2, 4, 6, 8, 10, 12, 14 or 16 therein). In one embodiment, the glucoamylase is SEQ ID NO: 2 in WO2011/068803 (i.e. Gloeophyllum sepiarium glucoamylase). In one embodiment, the glucoamylase is the Gloeophyllum sepiarium glucoamylase of SEQ ID NO: 8. In one embodiment, the glucoamylase is the Pycnoporus sanguineus glucoamylase of SEQ ID NO: 229.

[0239] In one embodiment, the glucoamylase is a Gloeophyllum trabeum glucoamylase (disclosed as SEQ ID NO: 3 in WO2014/177546). In another embodiment, the glucoamylase is derived from a strain of the genus Nigrofomes, in particular a strain of Nigrofomes sp. disclosed in WO2012/064351 (disclosed as SEQ ID NO: 2 therein).

[0240] Also contemplated are glucoamylases with a mature polypeptide sequence which exhibit a high identity to any of the above mentioned glucoamylases, i.e., at least 60%, such as at least 70%, at least 75%, at least 80%, at least 85%, at least 90%, at least 95%, at least 96%, at least 97%, at least 98%, at least 99% or even 100% identity to any one of the mature polypeptide sequences mentioned above.

[0241] Glucoamylases may be added to the saccharification and/or fermentation in an amount of 0.0001-20 AGU/g DS, such as 0.001-10 AGU/g DS, 0.01-5 AGU/g DS, or 0.1-2 AGU/g DS.

[0242] Glucoamylases may be added to the saccharification and/or fermentation in an amount of 1-1,000 μg EP/g DS, such as 10-500 μg/gDS, or 25-250 μg/g DS.

[0243] Glucoamylases may be added to liquefaction in an amount of 0.1-100 μg EP/g DS, such as 0.5-50 μg EP/g DS, 1-25 μg EP/g DS, or 2-12 μg EP/g DS.

[0244] In one embodiment, the glucoamylase is added as a blend further comprising an alpha-amylase (e.g., any alpha-amylase described herein). In one embodiment, the alpha-amylase is a fungal alpha-amylase, especially an acid fungal alpha-amylase. The alpha-amylase is typically a side activity.

[0245] In one embodiment, the glucoamylase is a blend comprising Talaromyces emersonii glucoamylase disclosed in WO 99/28448 as SEQ ID NO: 34 and Trametes cingulata glucoamylase disclosed as SEQ ID NO: 2 in WO06/069289.

[0246] In one embodiment, the glucoamylase is a blend comprising Talaromyces emersonii glucoamylase disclosed in WO 99/28448, Trametes cingulata glucoamylase disclosed as SEQ ID NO: 2 in WO06/69289, and an alpha-amylase.

[0247] In one embodiment, the glucoamylase is a blend comprising Talaromyces emersonii glucoamylase disclosed in WO99/28448, Trametes cingulata glucoamylase disclosed in WO 06/69289, and Rhizomucor pusillus alpha-amylase with Aspergillus niger glucoamylase linker and SBD disclosed as V039 in Table 5 in WO2006/069290.

[0248] In one embodiment, the glucoamylase is a blend comprising Gloeophyllum sepiarium glucoamylase shown as SEQ ID NO: 2 in WO2011/068803 and an alpha-amylase, in particular Rhizomucor pusillus alpha-amylase with an Aspergillus niger glucoamylase linker and starch-binding domain (SBD), disclosed SEQ ID NO: 3 in WO2013/006756, in particular with the following substitutions: G128D+D143N.

[0249] In one embodiment, the alpha-amylase may be derived from a strain of the genus Rhizomucor, preferably a strain the Rhizomucor pusillus, such as the one shown in SEQ ID NO: 3 in WO2013/006756, or the genus Meripilus, preferably a strain of Meripilus giganteus.

[0250] In one embodiment, the alpha-amylase is derived from a Rhizomucor pusillus with an Aspergillus nigerglucoamylase linker and starch-binding domain (SBD), disclosed as V039 in Table 5 in WO2006/069290.

[0251] In one embodiment, the Rhizomucor pusillus alpha-amylase or the Rhizomucor pusillus alpha-amylase with an Aspergillus niger glucoamylase linker and starch-binding domain (SBD) has at least one of the following substitutions or combinations of substitutions: D165M; Y141W; Y141R; K136F; K192R; P224A; P224R; S123H+Y141W; G20S+Y141W; A76G+Y141W; G128D+Y141W; G128D+D143N; P219C+Y141W; N142D+D143N; Y141W+K192R; Y141W+D143N; Y141W+N383R; Y141W+P219C+A265C; Y141W+N142D+D143N; Y141W+K192R V410A; G128D+Y141W+D143N; Y141W+D143N+P219C; Y141W+D143N+K192R; G128D+D143N+K192R; Y141W+D143N+K192R+P219C; and G128D+Y141W+D143N+K192R; or G128D+Y141W+D143N+K192R+P219C (using SEQ ID NO: 3 in WO2013/006756 for numbering).

[0252] In one embodiment, the glucoamylase blend comprises Gloeophyllum sepiarium glucoamylase (e.g., SEQ ID NO: 2 in WO2011/068803) and Rhizomucor pusillus alpha-amylase.

[0253] In one embodiment, the glucoamylase blend comprises Gloeophyllum sepiarium glucoamylase shown as SEQ ID NO: 2 in WO2011/068803 and Rhizomucor pusillus with an Aspergillus niger glucoamylase linker and starch-binding domain (SBD), disclosed SEQ ID NO: 3 in WO2013/006756 with the following substitutions: G128D+D143N. Commercially available compositions comprising glucoamylase include AMG 200L; AMG 300 L; SAN™ SUPER, SAN™ EXTRA L, SPIRIZYME® PLUS, SPIRIZYME® FUEL, SPIRIZYME® B4U, SPIRIZYME® ULTRA, SPIRIZYME® EXCEL, SPIRIZYME ACHIEVE®, and AMG® E (from Novozymes A/S); OPTIDEX™ 300, GC480, GC417 (from DuPont-Danisco); AMIGASE™ and AMIGASE™ PLUS (from DSM); G-ZYME™ G900, G-ZYME™ and G990 ZR (from DuPont-Danisco).

[0254] In one embodiment, the glucoamylase is derived from the Debaryomyces occidentalis glucoamylase of SEQ ID NO: 102. In one embodiment, the glucoamylase is derived from the Saccharomycopsis fibuligera glucoamylase of SEQ ID NO: 103. In one embodiment, the glucoamylase is derived from the Saccharomycopsis fibuligera glucoamylase of SEQ ID NO: 104. In one embodiment, the glucoamylase is derived from the Saccharomyces cerevisiae glucoamylase of SEQ ID NO: 105. In one embodiment, the glucoamylase is derived from the Aspergillus niger glucoamylase of SEQ ID NO: 106. In one embodiment, the glucoamylase is derived from the Aspergillus oryzae glucoamylase of SEQ ID NO: 107. In one embodiment, the glucoamylase is derived from the Rhizopus oryzae glucoamylase of SEQ ID NO: 108 or SEQ ID NO: 250. In one embodiment, the glucoamylase is derived from the Clostridium thermocellum glucoamylase of SEQ ID NO: 109. In one embodiment, the glucoamylase is derived from the Clostridium thermocellum glucoamylase of SEQ ID NO: 110. In one embodiment, the glucoamylase is derived from the Arxula adeninivorans glucoamylase of SEQ ID NO: 111. In one embodiment, the glucoamylase is derived from the Hormoconis resinae glucoamylase of SEQ ID NO: 112. In one embodiment, the glucoamylase is derived from the Aureobasidium pullulans glucoamylase of SEQ ID NO: 113. In one embodiment, the glucoamylase is derived from the Rhizopus microsporus glucoamylase of SEQ ID NO: 248. In one embodiment, the glucoamylase is derived from the Rhizopus delemar glucoamylase of SEQ ID NO: 249. In one embodiment, the glucoamylase is derived from the Punctularia strigosozonata glucoamylase of SEQ ID NO: 244. In one embodiment, the glucoamylase is derived from the Fibroporia radiculosa glucoamylase of SEQ ID NO: 245. In one embodiment, the glucoamylase is derived from the Wolfiporia cocos glucoamylase of SEQ ID NO: 246.

[0255] In one embodiment, the glucoamylase is a Trichoderma reesei glucoamylase, such as the Trichoderma reesei glucoamylase of SEQ ID NO: 230.

[0256] In one embodiment, the glucoamylase has a Relative Activity heat stability at 85° C. of at least 20%, at least 30%, or at least 35% determined as described in Example 4 of WO2018/098381 (heat stability).

[0257] In one embodiment, the glucoamylase has a relative activity pH optimum at pH 5.0 of at least 90%, e.g., at least 95%, at least 97%, or 100% determined as described in Example 4 of WO2018/098381 (pH optimum).

[0258] In one embodiment, the glucoamylase has a pH stability at pH 5.0 of at least 80%, at least 85%, at least 90% determined as described in Example 4 of WO2018/098381 (pH stability).

[0259] In one embodiment, the glucoamylase used in liquefaction, such as a Penicillium oxalicum glucoamylase variant, has a thermostability determined as DSC Td at pH 4.0 as described in Example 15 of WO2018/098381 of at least 70° C., preferably at least 75° C., such as at least 80° C., such as at least 81° C., such as at least 82° C., such as at least 83° C., such as at least 84° C., such as at least 85° C., such as at least 86° C., such as at least 87%, such as at least 88° C., such as at least 89° C., such as at least 90° C. In one embodiment, the glucoamylase, such as a Penicillium oxalicum glucoamylase variant, has a thermostability determined as DSC Td at pH 4.0 as described in Example 15 of WO2018/098381 in the range between 70° C. and 95° C., such as between 80° C. and 90° C.

[0260] In one embodiment, the glucoamylase, such as a Penicillium oxalicum glucoamylase variant, used in liquefaction has a thermostability determined as DSC Td at pH 4.8 as described in Example 15 of WO2018/098381 of at least 70° C., preferably at least 75° C., such as at least 80° C., such as at least 81° C., such as at least 82° C., such as at least 83° C., such as at least 84° C., such as at least 85° C., such as at least 86° C., such as at least 87%, such as at least 88° C., such as at least 89° C., such as at least 90° C., such as at least 91° C. In one embodiment, the glucoamylase, such as a Penicillium oxalicum glucoamylase variant, has a thermostability determined as DSC Td at pH 4.8 as described in Example 15 of WO2018/098381 in the range between 70° C. and 95° C., such as between 80° C. and 90° C.

[0261] In one embodiment, the glucoamylase, such as a Penicillium oxalicum glucoamylase variant, used in liquefaction has a residual activity determined as described in Example 16 of WO2018/098381, of at least 100% such as at least 105%, such as at least 110%, such as at least 115%, such as at least 120%, such as at least 125%. In one embodiment, the glucoamylase, such as a Penicillium oxalicum glucoamylase variant, has a thermostability determined as residual activity as described in Example 16 of WO2018/098381, in the range between 100% and 130%.

[0262] In one embodiment, the glucoamylase, e.g., of fungal origin such as a filamentous fungi, from a strain of the genus Penicillium, e.g., a strain of Penicillium oxalicum, in particular the Penicillium oxalicum glucoamylase disclosed as SEQ ID NO: 2 in WO2011/127802 (which is hereby incorporated by reference).

[0263] In one embodiment, the glucoamylase has a mature polypeptide sequence of at least 80%, e.g., at least 85%, at least 90%, at least 91%, at least 92%, at least 93%, at least 94%, at least 95%, at least 96%, at least 97%, at least 98%, at least 99% or 100% identity to the mature polypeptide shown in SEQ ID NO: 2 in WO2011/127802.

[0264] In one embodiment, the glucoamylase is a variant of the Penicillium oxalicum glucoamylase disclosed as SEQ ID NO: 2 in WO2011/127802, having a K79V substitution. The K79V glucoamylase variant has reduced sensitivity to protease degradation relative to the parent as disclosed in WO2013/036526 (which is hereby incorporated by reference).

[0265] In one embodiment, the glucoamylase is derived from Penicillium oxalicum.

[0266] In one embodiment, the glucoamylase is a variant of the Penicillium oxalicum glucoamylase disclosed as SEQ ID NO: 2 in WO2011/127802. In one embodiment, the Penicillium oxalicum glucoamylase is the one disclosed as SEQ ID NO: 2 in WO2011/127802 having Val (V) in position 79.

[0267] Contemplated Penicillium oxalicum glucoamylase variants are disclosed in WO2013/053801 which is hereby incorporated by reference.

[0268] In one embodiment, these variants have reduced sensitivity to protease degradation.

[0269] In one embodiment, these variants have improved thermostability compared to the parent.

[0270] In one embodiment, the glucoamylase has a K79V substitution (using SEQ ID NO: 2 of WO2011/127802 for numbering), corresponding to the PE001 variant, and further comprises one of the following alterations or combinations of alterations

[0271] T65A; Q327F; E501V; Y504T; Y504*; T65A+Q327F; T65A+E501V; T65A+Y504T; T65A+Y504*; Q327F+E501V; Q327F+Y504T; Q327F+Y504*; E501V+Y504T; E501V+Y504*; T65A+Q327F+E501V; T65A+Q327F+Y504T; T65A+E501V+Y504T; Q327F+E501V+Y504T; T65A+Q327F+Y504*; T65A+E501V+Y504*; Q327F+E501V+Y504*; T65A+Q327F+E501V+Y504T; T65A+Q327F+E501V+Y504*; E501V+Y504T; T65A+K161S; T65A+Q405T; T65A+Q327W; T65A+Q327F; T65A+Q327Y; P11F+T65A+Q327F; R1K+D3W+K5Q+G7V+N8S+T10K+P11S+T65A+Q327F; P2N+P4S+P11F+T65A+Q327F; P11F+D26C+K33C+T65A+Q327F; P2N+P4S+P11F+T65A+Q327W+E501V+Y504T; R1E+D3N+P4G+G6R+G7A+N8A+T10D+P11D+T65A+Q327F; P11F+T65A+Q327W; P2N+P4S+P11F+T65A+Q327F+E501V+Y504T; P11F+T65A+Q327W+E501V+Y504T; T65A+Q327F+E501V+Y504T; T65A+S105P+Q327W; T65A+S105P+Q327F; T65A+Q327W+S364P; T65A+Q327F+S364P; T65A+S103N+Q327F; P2N+P4S+P11F+K34Y+T65A+Q327F; P2N+P4S+P11F+T65A+Q327F+D445N+V447S; P2N+P4S+P11F+T65A+I172V+Q327F; P2N+P4S+P11F+T65A+Q327F+N502*; P2N+P4S+P11F+T65A+Q327F+N502T+P563S+K571E; P2N+P4S+P11F+R31S+K33V+T65A+Q327F+N564D+K571S; P2N+P4S+P11F+T65A+Q327F+S377T; P2N+P4S+P11F+T65A+V325T+Q327W; P2N+P4S+P11F+T65A+Q327F+D445N+V447S+E501V+Y504T; P2N+P4S+P11F+T65A+I172V+Q327F+E501V+Y504T; P2N+P4S+P11F+T65A+Q327F+S377T+E501V+Y504T; P2N+P4S+P11F+D26N+K34Y+T65A+Q327F; P2N+P4S+P11F+T65A+Q327F+I375A+E501V+Y504T; P2N+P4S+P11F+T65A+K218A+K221D+Q327F+E501V+Y504T; P2N+P4S+P11F+T65A+S103N+Q327F+E501V+Y504T; P2N+P4S+T10D+T65A+Q327F+E501V+Y504T; P2N+P4S+F12Y+T65A+Q327F+E501V+Y504T; K5A+P11F+T65A+Q327F+E501V+Y504T; P2N+P4S+T10E+E18N+T65A+Q327F+E501V+Y504T; P2N+T10E+E18N+T65A+Q327F+E501V+Y504T; P2N+P4S+P11F+T65A+Q327F+E501V+Y504T+T568N; P2N+P4S+P11F+T65A+Q327F+E501V+Y504T+K524T+G526A; P2N+P4S+P11F+K34Y+T65A+Q327F+D445N+V447S+E501V+Y504T; P2N+P4S+P11F+R31S+K33V+T65A+Q327F+D445N+V447S+E501V+Y504T; P2N+P4S+P11F+D26N+K34Y+T65A+Q327F+E501V+Y504T; P2N+P4S+P11F+T65A+F80*+Q327F+E501V+Y504T; P2N+P4S+P11F+T65A+K112S+Q327F+E501V+Y504T; P2N+P4S+P11F+T65A+Q327F+E501V+Y504T+T516P+K524T+G526A; P2N+P4S+P11F+T65A+Q327F+E501V+N502T+Y504*; P2N+P4S+P11F+T65A+Q327F+E501V+Y504T; P2N+P4S+P11F+T65A+S103N+Q327F+E501V+Y504T; K5A+P11F+T65A+Q327F+E501V+Y504T; P2N+P4S+P11F+T65A+Q327F+E501V+Y504T+T516P+K524T+G526A; P2N+P4S+P11F+T65A+V79A+Q327F+E501V+Y504T; P2N+P4S+P11F+T65A+V79G+Q327F+E501V+Y504T; P2N+P4S+P11F+T65A+V791+Q327F+E501V+Y504T; P2N+P4S+P11F+T65A+V79L+Q327F+E501V+Y504T; P2N+P4S+P11F+T65A+V79S+Q327F+E501V+Y504T; P2N+P4S+P11F+T65A+L72V+Q327F+E501V+Y504T; S255N+Q327F+E501V+Y504T; P2N+P4S+P11F+T65A+E74N+V79K+Q327F+E501V+Y504T; P2N+P4S+P11F+T65A+G220N+Q327F+E501V+Y504T; P2N+P4S+P11F+T65A+Y245N+Q327F+E501V+Y504T; P2N+P4S+P11F+T65A+Q253N+Q327F+E501V+Y504T; P2N+P4S+P11F+T65A+D279N+Q327F+E501V+Y504T; P2N+P4S+P11F+T65A+Q327F+S359N+E501V+Y504T; P2N+P4S+P11F+T65A+Q327F+D370N+E501V+Y504T; P2N+P4S+P11F+T65A+Q327F+V460S+E501V+Y504T; P2N+P4S+P11F+T65A+Q327F+V460T+P468T+E501V+Y504T; P2N+P4S+P11F+T65A+Q327F+T463N+E501V+Y504T; P2N+P4S+P11F+T65A+Q327F+S465N+E501V+Y504T; and P2N+P4S+P11F+T65A+Q327F+T477N+E501V+Y504T.

[0272] In one embodiment, the Penicillium oxalicum glucoamylase variant has a K79V substitution (using SEQ ID NO: 2 of WO2011/127802 for numbering), corresponding to the PE001 variant, and further comprises one of the following substitutions or combinations of substitutions:

P11F+T65A+Q327F;

P2N+P4S+P11F+T65A+Q327F;

P11F+D26C+K33C+T65A+Q327F;

P2N+P4S+P11F+T65A+Q327W+E501V+Y504T;

P2N+P4S+P11F+T65A+Q327F+E501V+Y504T; and

P11F+T65A+Q327W+E501V+Y504T.

[0273] Additional glucoamylases contemplated for use with the present invention can be found in WO2011/153516 (the content of which is incorporated herein).

[0274] Additional polynucleotides encoding suitable glucoamylases may be obtained from microorganisms of any genus, including those readily available within the UniProtKB database.

[0275] The glucoamylase coding sequences can also be used to design nucleic acid probes to identify and clone DNA encoding glucoamylases from strains of different genera or species, as described supra.

[0276] The polynucleotides encoding glucoamylases may also be identified and obtained from other sources including microorganisms isolated from nature (e.g., soil, composts, water, etc.) or DNA samples obtained directly from natural materials (e.g., soil, composts, water, etc,) as described supra.

[0277] Techniques used to isolate or clone polynucleotides encoding glucoamylases are described supra.

[0278] In one embodiment, the glucoamylase has a mature polypeptide sequence that comprises or consists of the amino acid sequence of any one of the glucoamylases described or referenced herein (e.g., any one of SEQ ID NOs: 8, 102-113, 229, 230 and 244-250). In another embodiment, the glucoamylase has a mature polypeptide sequence that is a fragment of the any one of the glucoamylases described or referenced herein (e.g., any one of SEQ ID NOs: 8, 102-113, 229, 230 and 244-250). In one embodiment, the number of amino acid residues in the fragment is at least 75%, e.g., at least 80%, 85%, 90%, or 95% of the number of amino acid residues in referenced full length glucoamylase (e.g. any one of SEQ ID NOs: 8, 102-113, 229, 230 and 244-250). In other embodiments, the glucoamylase may comprise the catalytic domain of any glucoamylase described or referenced herein (e.g., the catalytic domain of any one of SEQ ID NOs: 8, 102-113, 229, 230 and 244-250).

[0279] The glucoamylase may be a variant of any one of the glucoamylases described supra (e.g., any one of SEQ ID NOs: 8, 102-113, 229, 230 and 244-250). In one embodiment, the glucoamylase has a mature polypeptide sequence of at least 60%, e.g., at least 65%, 70%, 75%, 80%, 85%, 90%, 95%, 97%, 98%, 99%, or 100% sequence identity to any one of the glucoamylases described supra (e.g., any one of SEQ ID NOs: 8, 102-113, 229, 230 and 244-250).

[0280] Examples of suitable amino acid changes, such as conservative substitutions that do not significantly affect the folding and/or activity of the glucoamylase, are described herein.

[0281] In one embodiment, the glucoamylase has a mature polypeptide sequence that differs by no more than ten amino acids, e.g., by no more than five amino acids, by no more than four amino acids, by no more than three amino acids, by no more than two amino acids, or by one amino acid from the amino acid sequence of any one of the glucoamylases described supra (e.g., any one of SEQ ID NOs: 8, 102-113, 229, 230 and 244-250). In one embodiment, the glucoamylase has an amino acid substitution, deletion, and/or insertion of one or more (e.g., two, several) of amino acid sequence of any one of the glucoamylases described supra (e.g., any one of SEQ ID NOs: 8, 102-113, 229, 230 and 244-250). In some embodiments, the total number of amino acid substitutions, deletions and/or insertions is not more than 10, e.g., not more than 9, 8, 7, 6, 5, 4, 3, 2, or 1.

[0282] In some embodiments, the glucoamylase has at least 20%, e.g., at least 40%, at least 50%, at least 60%, at least 70%, at least 80%, at least 90%, at least 95%, at least 96%, at least 97%, at least 98%, at least 99%, or 100% of the glucoamylase activity of any glucoamylase described or referenced herein (e.g., any one of SEQ ID NOs: 8, 102-113, 229, 230 and 244-250) under the same conditions.

[0283] In one embodiment, the glucoamylase coding sequence hybridizes under at least low stringency conditions, e.g., medium stringency conditions, medium-high stringency conditions, high stringency conditions, or very high stringency conditions with the full-length complementary strand of the coding sequence from any glucoamylase described or referenced herein (e.g., any one of SEQ ID NOs: 8, 102-113, 229, 230 and 244-250). In one embodiment, the glucoamylase coding sequence has at least 65%, e.g., at least 70%, at least 75%, at least 80%, at least 85%, at least 85%, at least 90%, at least 91%, at least 92%, at least 93%, at least 94%, at least 95%, at least 96%, at least 97%, at least 98%, at least 99%, or 100% sequence identity with the coding sequence from any glucoamylase described or referenced herein (e.g., any one of SEQ ID NOs: 8, 102-113, 229, 230 and 244-250).

[0284] In one embodiment, the glucoamylase comprises the coding sequence of any glucoamylase described or referenced herein (any one of SEQ ID NOs: 8, 102-113, 229, 230 and 244-250). In one embodiment, the glucoamylase comprises a coding sequence that is a subsequence of the coding sequence from any glucoamylase described or referenced herein, wherein the subsequence encodes a polypeptide having glucoamylase activity. In one embodiment, the number of nucleotides residues in the subsequence is at least 75%, e.g., at least 80%, 85%, 90%, or 95% of the number of the referenced coding sequence.

[0285] The referenced glucoamylase coding sequence of any related aspect or embodiment described herein can be the native coding sequence or a degenerate sequence, such as a codon-optimized coding sequence designed for use in a particular host cell (e.g., optimized for expression in Saccharomyces cerevisiae).

[0286] The glucoamylase can also include fused polypeptides or cleavable fusion polypeptides, as described supra.

[0287] Alpha-Amylases

[0288] The host cells and fermenting organisms may express a heterologous alpha-amylase. The alpha-amylase may be any alpha-amylase that is suitable for the host cells and/or the methods described herein, such as a naturally occurring alpha-amylase (e.g., a native alpha-amylase from another species or an endogenous alpha-amylase expressed from a modified expression vector) or a variant thereof that retains alpha-amylase activity. Any alpha-amylase contemplated for expression by a host cell or fermenting organism described below is also contemplated for embodiments of the invention involving exogenous addition of an alpha-amylase.

[0289] In some embodiments, the host cell or fermenting organism comprises a heterologous polynucleotide encoding an alpha-amylase, for example, as described in WO2017/087330 or WO2020/023411, the content of which is hereby incorporated by reference. Any alpha-amylase described or referenced herein is contemplated for expression in the host cell or fermenting organism.

[0290] In some embodiments, the host cell or fermenting organism comprising a heterologous polynucleotide encoding an alpha-amylase has an increased level of alpha-amylase activity compared to the host cells without the heterologous polynucleotide encoding the alpha-amylase, when cultivated under the same conditions. In some embodiments, the host cell or fermenting organism has an increased level of alpha-amylase activity of at least 5%, e.g., at least 10%, at least 15%, at least 20%, at least 25%, at least 50%, at least 100%, at least 150%, at least 200%, at least 300%, or at 500% compared to the host cell or fermenting organism without the heterologous polynucleotide encoding the alpha-amylase, when cultivated under the same conditions (e.g., as described in Example 2).

[0291] Exemplary alpha-amylases that can be used with the host cells and/or the methods described herein include bacterial, yeast, or filamentous fungal alpha-amylases, e.g., derived from any of the microorganisms described or referenced herein.

[0292] The term “bacterial alpha-amylase” means any bacterial alpha-amylase classified under EC 3.2.1.1. A bacterial alpha-amylase used herein may, e.g., be derived from a strain of the genus Bacillus, which is sometimes also referred to as the genus Geobacillus. In one embodiment, the Bacillus alpha-amylase is derived from a strain of Bacillus amyloliquefaciens, Bacillus licheniformis, Bacillus stearothermophilus, or Bacillus subtilis, but may also be derived from other Bacillus sp.

[0293] Specific examples of bacterial alpha-amylases include the Bacillus stearothermophilus alpha-amylase (BSG) of SEQ ID NO: 3 in WO99/19467, the Bacillus amyloliquefaciens alpha-amylase (BAN) of SEQ ID NO: 5 in WO99/19467, and the Bacillus licheniformis alpha-amylase (BLA) of SEQ ID NO: 4 in WO99/19467 (all sequences are hereby incorporated by reference). In one embodiment, the alpha-amylase may be an enzyme having a mature polypeptide sequence with a degree of identity of at least 60%, e.g., at least 70%, at least 80%, at least 90%, at least 95%, at least 96%, at least 97%, at least 98% or at least 99% to any of the sequences shown in SEQ ID NOs: 3, 4 or 5, in WO99/19467.

[0294] In one embodiment, the alpha-amylase is derived from Bacillus stearothermophilus. The Bacillus stearothermophilus alpha-amylase may be a mature wild-type or a mature variant thereof. The mature Bacillus stearothermophilus alpha-amylases may naturally be truncated during recombinant production. For instance, the Bacillus stearothermophilus alpha-amylase may be a truncated at the C-terminal, so that it is from 480-495 amino acids long, such as about 491 amino acids long, e.g., so that it lacks a functional starch binding domain (compared to SEQ ID NO: 3 in WO99/19467).

[0295] The Bacillus alpha-amylase may also be a variant and/or hybrid. Examples of such a variant can be found in any of WO96/23873, WO96/23874, WO97/41213, WO99/19467, WO00/60059, and WO02/10355 (each hereby incorporated by reference). Specific alpha-amylase variants are disclosed in U.S. Pat. Nos. 6,093,562, 6,187,576, 6,297,038, and 7,713,723 (hereby incorporated by reference) and include Bacillus stearothermophilus alpha-amylase (often referred to as BSG alpha-amylase) variants having a deletion of one or two amino acids at positions R179, G180, 1181 and/or G182, preferably a double deletion disclosed in WO96/23873— see, e.g., page 20, lines 1-10 (hereby incorporated by reference), such as corresponding to deletion of positions 1181 and G182 compared to the amino acid sequence of Bacillus stearothermophilus alpha-amylase set forth in SEQ ID NO: 3 disclosed in WO99/19467 or the deletion of amino acids R179 and G180 using SEQ ID NO: 3 in WO99/19467 for numbering (which reference is hereby incorporated by reference). In some embodiments, the Bacillus alpha-amylases, such as Bacillus stearothermophilus alpha-amylases, have a double deletion corresponding to a deletion of positions 181 and 182 and further optionally comprise a N193F substitution (also denoted 1181*+G182*+N193F) compared to the wild-type BSG alpha-amylase amino acid sequence set forth in SEQ ID NO: 3 disclosed in WO 99/19467. The bacterial alpha-amylase may also have a substitution in a position corresponding to S239 in the Bacillus licheniformis alpha-amylase shown in SEQ ID NO: 4 in WO99/19467, or a S242 and/or E188P variant of the Bacillus stearothermophilus alpha-amylase of SEQ ID NO: 3 in WO99/19467.

[0296] In one embodiment, the variant is a S242A, E or Q variant, e.g., a S242Q variant, of the Bacillus stearothermophilus alpha-amylase.

[0297] In one embodiment, the variant is a position E188 variant, e.g., E188P variant of the Bacillus stearothermophilus alpha-amylase.

[0298] The bacterial alpha-amylase may, in one embodiment, be a truncated Bacillus alpha-amylase. In one embodiment, the truncation is so that, e.g., the Bacillus stearothermophilus alpha-amylase shown in SEQ ID NO: 3 in WO99/19467, is about 491 amino acids long, such as from 480 to 495 amino acids long, or so it lacks a functional starch bind domain.

[0299] The bacterial alpha-amylase may also be a hybrid bacterial alpha-amylase, e.g., an alpha-amylase comprising 445 C-terminal amino acid residues of the Bacillus licheniformis alpha-amylase (shown in SEQ ID NO: 4 of WO99/19467) and the 37 N-terminal amino acid residues of the alpha-amylase derived from Bacillus amyloliquefaciens (shown in SEQ ID NO: 5 of WO99/19467). In one embodiment, this hybrid has one or more, especially all, of the following substitutions: G48A+T49I+G107A+H156Y+A181T+N190F+I201F+A209V+Q264S (using the Bacillus licheniformis numbering in SEQ ID NO: 4 of WO 99/19467). In some embodiments, the variants have one or more of the following mutations (or corresponding mutations in other Bacillus alpha-amylases): H154Y, A181T, N190F, A209V and Q264S and/or the deletion of two residues between positions 176 and 179, e.g., deletion of E178 and G179 (using SEQ ID NO: 5 of WO99/19467 for position numbering).

[0300] In one embodiment, the bacterial alpha-amylase is the mature part of the chimeric alpha-amylase disclosed in Richardson et al. (2002), The Journal of Biological Chemistry, Vol. 277, No 29, Issue 19 July, pp. 267501-26507, referred to as BD5088 ora variant thereof. This alpha-amylase is the same as the one shown in SEQ ID NO: 2 in WO2007/134207. The mature enzyme sequence starts after the initial “Met” amino acid in position 1.

[0301] The alpha-amylase may be a thermostable alpha-amylase, such as a thermostable bacterial alpha-amylase, e.g., from Bacillus stearothermophilus. In one embodiment, the alpha-amylase used in a process described herein has a T½ (min) at pH 4.5, 85° C., 0.12 mM CaCl₂ of at least 10 determined as described in Example 1 of WO2018/098381.

[0302] In one embodiment, the thermostable alpha-amylase has a T½ (min) at pH 4.5, 85° C., 0.12 mM CaCl₂, of at least 15. In one embodiment, the thermostable alpha-amylase has a T½ (min) at pH 4.5, 85° C., 0.12 mM CaCl₂, of as at least 20. In one embodiment, the thermostable alpha-amylase has a T½ (min) at pH 4.5, 85° C., 0.12 mM CaCl₂, of as at least 25. In one embodiment, the thermostable alpha-amylase has a T½ (min) at pH 4.5, 85° C., 0.12 mM CaCl₂, of as at least 30. In one embodiment, the thermostable alpha-amylase has a T½ (min) at pH 4.5, 85° C., 0.12 mM CaCl₂, of as at least 40.

[0303] In one embodiment, the thermostable alpha-amylase has a T½ (min) at pH 4.5, 85° C., 0.12 mM CaCl₂, of at least 50. In one embodiment, the thermostable alpha-amylase has a T½ (min) at pH 4.5, 85° C., 0.12 mM CaCl₂, of at least 60. In one embodiment, the thermostable alpha-amylase has a T½ (min) at pH 4.5, 85° C., 0.12 mM CaCl₂, between 10-70. In one embodiment, the thermostable alpha-amylase has a T½ (min) at pH 4.5, 85° C., 0.12 mM CaCl₂, between 15-70. In one embodiment, the thermostable alpha-amylase has a T½ (min) at pH 4.5, 85° C., 0.12 mM CaCl₂, between 20-70. In one embodiment, the thermostable alpha-amylase has a T½ (min) at pH 4.5, 85° C., 0.12 mM CaCl₂, between 25-70. In one embodiment, the thermostable alpha-amylase has a T½ (min) at pH 4.5, 85° C., 0.12 mM CaCl₂, between 30-70. In one embodiment, the thermostable alpha-amylase has a T½ (min) at pH 4.5, 85° C., 0.12 mM CaCl₂, between 40-70. In one embodiment, the thermostable alpha-amylase has a T½ (min) at pH 4.5, 85° C., 0.12 mM CaCl₂, between 50-70. In one embodiment, the thermostable alpha-amylase has a T½ (min) at pH 4.5, 85° C., 0.12 mM CaCl₂, between 60-70.

[0304] In one embodiment, the alpha-amylase is a bacterial alpha-amylase, e.g., derived from the genus Bacillus, such as a strain of Bacillus stearothermophilus, e.g., the Bacillus stearothermophilus as disclosed in WO99/019467 as SEQ ID NO: 3 with one or two amino acids deleted at positions R179, G180, 1181 and/or G182, in particular with R179 and G180 deleted, or with 1181 and G182 deleted, with mutations in below list of mutations.

[0305] In some embodiment, the Bacillus stearothermophilus alpha-amylases have double deletion 1181+G182, and optional substitution N193F, further comprising one of the following substitutions or combinations of substitutions:

[0306] V59A+Q89R+G112D+E129V+K177L+R179E+K220P+N224L+Q254S;

[0307] V59A+Q89R+E129V+K177L+R179E+H208Y+K220P+N224L+Q254S;

[0308] V59A+Q89R+E129V+K177L+R179E+K220P+N224L+Q254S+D269E+D281N;

[0309] V59A+Q89R+E129V+K177L+R179E+K220P+N224L+Q254S+I270L;

[0310] V59A+Q89R+E129V+K177L+R179E+K220P+N224L+Q254S+H274K;

[0311] V59A+Q89R+E129V+K177L+R179E+K220P+N224L+Q254S+Y276F;

[0312] V59A+E129V+R157Y+K177L+R179E+K220P+N224L+S242Q+Q254S;

[0313] V59A+E129V+K177L+R179E+H208Y+K220P+N224L+S242Q+Q254S;

[0314] V59A+E129V+K177L+R179E+K220P+N224L+S242Q+Q254S;

[0315] V59A+E129V+K177L+R179E+K220P+N224L+S242Q+Q254S+H274K;

[0316] V59A+E129V+K177L+R179E+K220P+N224L+S242Q+Q254S+Y276F;

[0317] V59A+E129V+K177L+R179E+K220P+N224L+S242Q+Q254S+D281N;

[0318] V59A+E129V+K177L+R179E+K220P+N224L+S242Q+Q254S+M284T;

[0319] V59A+E129V+K177L+R179E+K220P+N224L+S242Q+Q254S+G416V;

[0320] V59A+E129V+K177L+R179E+K220P+N224L+Q254S;

[0321] V59A+E129V+K177L+R179E+K220P+N224L+Q254S+M284T;

[0322] A91L+M961+E129V+K177L+R179E+K220P+N224L+S242Q+Q254S;

[0323] E129V+K177L+R179E;

[0324] E129V+K177L+R179E+K220P+N224L+S242Q+Q254S;

[0325] E129V+K177L+R179E+K220P+N224L+S242Q+Q254S+Y276F+L427M;

[0326] E129V+K177L+R179E+K220P+N224L+S242Q+Q254S+M284T;

[0327] E129V+K177L+R179E+K220P+N224L+S242Q+Q254S+N376*+I377*;

[0328] E129V+K177L+R179E+K220P+N224L+Q254S;

[0329] E129V+K177L+R179E+K220P+N224L+Q254S+M284T;

[0330] E129V+K177L+R179E+S242Q;

[0331] E129V+K177L+R179V+K220P+N224L+S242Q+Q254S;

[0332] K220P+N224L+S242Q+Q254S;

[0333] M284V;

[0334] V59A+Q89R+E129V+K177L+R179E+Q254S+M284V; and

[0335] V59A+E129V+K177L+R179E+Q254S+M284V;

[0336] In one embodiment, the alpha-amylase is selected from the group of Bacillus stearothermophilus alpha-amylase variants with double deletion 1181*+G182*, and optionally substitution N193F, and further one of the following substitutions or combinations of substitutions:

[0337] E129V+K177L+R179E;

[0338] V59A+Q89R+E129V+K177L+R179E+H208Y+K220P+N224L+Q254S;

[0339] V59A+Q89R+E129V+K177L+R179E+Q254S+M284V;

[0340] V59A+E129V+K177L+R179E+Q254S+M284V; and

[0341] E129V+K177L+R179E+K220P+N224L+S242Q+Q254S (using SEQ ID NO: 1 herein for numbering).

[0342] It should be understood that when referring to Bacillus stearothermophilus alpha-amylase and variants thereof they are normally produced in truncated form. In particular, the truncation may be so that the Bacillus stearothermophilus alpha-amylase shown in SEQ ID NO: 3 in WO99/19467, or variants thereof, are truncated in the C-terminal and are typically from 480-495 amino acids long, such as about 491 amino acids long, e.g., so that it lacks a functional starch binding domain.

[0343] In one embodiment, the alpha-amylase variant may be an enzyme having a mature polypeptide sequence with a degree of identity of at least 60%, e.g., at least 70%, at least 80%, at least 90%, at least 95%, at least 91%, at least 92%, at least 93%, at least 94%, at least 95%, at least 96%, at least 97%, at least 98% or at least 99%, but less than 100% to the sequence shown in SEQ ID NO: 3 in WO99/19467.

[0344] In one embodiment, the bacterial alpha-amylase, e.g., Bacillus alpha-amylase, such as especially Bacillus stearothermophilus alpha-amylase, or variant thereof, is dosed to liquefaction in a concentration between 0.01-10 KNU-A/g DS, e.g., between 0.02 and 5 KNU-A/g DS, such as 0.03 and 3 KNU-A, preferably 0.04 and 2 KNU-A/g DS, such as especially 0.01 and 2 KNU-A/g DS. In one embodiment, the bacterial alpha-amylase, e.g., Bacillus alpha-amylase, such as especially Bacillus stearothermophilus alpha-amylases, or variant thereof, is dosed to liquefaction in a concentration of between 0.0001-1 mg EP (Enzyme Protein)/g DS, e.g., 0.0005-0.5 mg EP/g DS, such as 0.001-0.1 mg EP/g DS.

[0345] In one embodiment, the bacterial alpha-amylase is derived from the Bacillus subtilis alpha-amylase of SEQ ID NO: 76, the Bacillus subtilis alpha-amylase of SEQ ID NO: 82, the Bacillus subtilis alpha-amylase of SEQ ID NO: 83, the Bacillus subtilis alpha-amylase of SEQ ID NO: 84, or the Bacillus licheniformis alpha-amylase of SEQ ID NO: 85, the Clostridium phytofermentans alpha-amylase of SEQ ID NO: 89, the Clostridium phytofermentans alpha-amylase of SEQ ID NO: 90, the Clostridium phytofermentans alpha-amylase of SEQ ID NO: 91, the Clostridium phytofermentans alpha-amylase of SEQ ID NO: 92, the Clostridium phytofermentans alpha-amylase of SEQ ID NO: 93, the Clostridium phytofermentans alpha-amylase of SEQ ID NO: 94, the Clostridium thermocellum alpha-amylase of SEQ ID NO: 95, the Thermobifida fusca alpha-amylase of SEQ ID NO: 96, the Thermobifida fusca alpha-amylase of SEQ ID NO: 97, the Anaerocellum thermophilum of SEQ ID NO: 98, the Anaerocellum thermophilum of SEQ ID NO: 99, the Anaerocellum thermophilum of SEQ ID NO: 100, the Streptomyces avermitilis of SEQ ID NO: 101, or the Streptomyces avermitilis of SEQ ID NO: 88.

[0346] In one embodiment, the alpha-amylase is derived from Bacillus amyloliquefaciens, such as the Bacillus amyloliquefaciens alpha-amylase of SEQ ID NO: 231 (e.g., as described in WO2018/002360, or variants thereof as described in WO2017/037614).

[0347] In one embodiment, the alpha-amylase is derived from a yeast alpha-amylase, such as the Saccharomycopsis fibuligera alpha-amylase of SEQ ID NO: 77, the Debaryomyces occidentalis alpha-amylase of SEQ ID NO: 78, the Debaryomyces occidentalis alpha-amylase of SEQ ID NO: 79, the Lipomyces kononenkoae alpha-amylase of SEQ ID NO: 80, the Lipomyces kononenkoae alpha-amylase of SEQ ID NO: 81.

[0348] In one embodiment, the alpha-amylase is derived from a filamentous fungal alpha-amylase, such as the Aspergillus niger alpha-amylase of SEQ ID NO: 86, or the Aspergillus niger alpha-amylase of SEQ ID NO: 87.

[0349] Additional alpha-amylases that may be expressed with the host cells and fermenting organisms and used with the methods described herein are described in the examples, and include, but are not limited to alpha-amylases shown in Table 2 (or derivatives thereof).

TABLE 2

| Donor Organism | SEQ ID NO: |
|---|---|
| (catalytic domain) | (mature polypeptide) |
| Rhizomucor pusillus | 121 |
| Bacillus licheniformis | 122 |
| Aspergillus niger | 123 |
| Aspergillus tamarii | 124 |
| Acidomyces richmondensis | 125 |
| Aspergillus bombycis | 126 |
| Alternaria sp | 127 |
| Rhizopus microsporus | 128 |
| Syncephalastrum racemosum | 129 |
| Rhizomucor pusillus | 130 |
| Dichotomocladium hesseltinei | 131 |
| Lichtheimia ramosa | 132 |
| Penicillium aethiopicum | 133 |
| Subulispora sp | 134 |
| Trichoderma paraviridescens | 135 |
| Byssoascus striatosporus | 136 |
| Aspergillus brasiliensis | 137 |
| Penicillium subspinulosum | 138 |
| Penicillium antarcticum | 139 |
| Penicillium coprophilum | 140 |
| Penicillium olsonii | 141 |
| Penicillium vasconiae | 142 |
| Penicillium sp | 143 |
| Heterocephalum aurantiacum | 144 |
| Neosartorya massa | 145 |
| Penicillium janthinellum | 146 |
| Aspergillus brasiliensis | 147 |
| Aspergillus westerdijkiae | 148 |
| Hamigera avellanea | 149 |
| Hamigera avellanea | 150 |
| Meripilus giganteus | 151 |
| Cerrena unicolor | 152 |
| Physalacria cryptomeriae | 153 |
| Lenzites betulinus | 154 |
| Trametes ljubarskyi | 155 |
| Bacillus subtilis | 156 |
| Bacillus subtilis subsp. subtilis | 157 |
| Schwanniomyces occidentalis | 158 |
| Rhizomucor pusillus | 159 |
| Aspergillus niger | 160 |
| Bacillus stearothermophilus | 161 |
| Bacillus halmapalus | 162 |
| Aspergillus oryzae | 163 |
| Bacillus amyloliquefaciens | 164 |
| Rhizomucor pusillus | 165 |
| Kionochaeta ivoriensis | 166 |
| Aspergillus niger | 167 |
| Aspergillus oryzae | 168 |
| Penicillium canescens | 169 |
| Acidomyces acidothermus | 170 |
| Kinochaeta ivoriensis | 171 |
| Aspergillus terreus | 172 |
| Thamnidium elegans | 173 |
| Meripilus giganteus | 174 |
| Bacillus amyloliquefaciens | 231 |
| Thermococcus gammatolerans | 251 |
| Thermococcus thioreducens | 252 |
| Thermococcus eurythermalis | 253 |
| Thermococcus hydrothermalis | 254 |
| Pyrococcus furiosus | 255 |
| Bacillus amyloliquefaciens | 256 |

[0350] Additional alpha-amylases contemplated for use with the present invention can be found in WO2011/153516, WO2017/087330 and WO2020/023411 (the content of which is incorporated herein).

[0351] Additional polynucleotides encoding suitable alpha-amylases may be obtained from microorganisms of any genus, including those readily available within the UniProtKB database.

[0352] The alpha-amylase coding sequences can also be used to design nucleic acid probes to identify and clone DNA encoding trehalases from strains of different genera or species, as described supra.

[0353] The polynucleotides encoding alpha-amylases may also be identified and obtained from other sources including microorganisms isolated from nature (e.g., soil, composts, water, etc.) or DNA samples obtained directly from natural materials (e.g., soil, composts, water, etc.) as described supra.

[0354] Techniques used to isolate or clone polynucleotides encoding alpha-amylases are described supra.

[0355] In one embodiment, the alpha-amylase has a mature polypeptide sequence that comprises or consists of the amino acid sequence of any one of the alpha-amylases described or referenced herein (e.g., any one of SEQ ID NOs: 76-101, 121-174, 231 and 251-256). In another embodiment, the alpha-amylase has a mature polypeptide sequence that is a fragment of the any one of the alpha-amylases described or referenced herein (e.g., any one of SEQ ID NOs: 76-101, 121-174, 231 and 251-256). In one embodiment, the number of amino acid residues in the fragment is at least 75%, e.g., at least 80%, 85%, 90%, or 95% of the number of amino acid residues in referenced full length alpha-amylase (e.g. any one of SEQ ID NOs: 76-101, 121-174, 231 and 251-256). In other embodiments, the alpha-amylase may comprise the catalytic domain of any alpha-amylase described or referenced herein (e.g., the catalytic domain of any one of SEQ ID NOs: 76-101, 121-174, 231 and 251-256).

[0356] The alpha-amylase may be a variant of any one of the alpha-amylases described supra (e.g., any one of SEQ ID NOs: 76-101, 121-174, 231 and 251-256). In one embodiment, the alpha-amylase has a mature polypeptide sequence of at least 60%, e.g., at least 65%, 70%, 75%, 80%, 85%, 90%, 95%, 97%, 98%, 99%, or 100% sequence identity to any one of the alpha-amylases described supra (e.g., any one of SEQ ID NOs: 76-101, 121-174, 231 and 251-256).

[0357] Examples of suitable amino acid changes, such as conservative substitutions that do not significantly affect the folding and/or activity of the alpha-amylase, are described herein.

[0358] In one embodiment, the alpha-amylase has a mature polypeptide sequence that differs by no more than ten amino acids, e.g., by no more than five amino acids, by no more than four amino acids, by no more than three amino acids, by no more than two amino acids, or by one amino acid from the amino acid sequence of any one of the alpha-amylases described supra (e.g., any one of SEQ ID NOs: 76-101, 121-174, 231 and 251-256). In one embodiment, the alpha-amylase has an amino acid substitution, deletion, and/or insertion of one or more (e.g., two, several) of amino acid sequence of any one of the alpha-amylases described supra (e.g., any one of SEQ ID NOs: 76-101, 121-174, 231 and 251-256). In some embodiments, the total number of amino acid substitutions, deletions and/or insertions is not more than 10, e.g., not more than 9, 8, 7, 6, 5, 4, 3, 2, or 1.

[0359] In some embodiments, the alpha-amylase has at least 20%, e.g., at least 40%, at least 50%, at least 60%, at least 70%, at least 80%, at least 90%, at least 95%, at least 96%, at least 97%, at least 98%, at least 99%, or 100% of the alpha-amylase activity of any alpha-amylase described or referenced herein (e.g., any one of SEQ ID NOs: 76-101, 121-174, 231 and 251-256) under the same conditions.

[0360] In one embodiment, the alpha-amylase coding sequence hybridizes under at least low stringency conditions, e.g., medium stringency conditions, medium-high stringency conditions, high stringency conditions, or very high stringency conditions with the full-length complementary strand of the coding sequence from any alpha-amylase described or referenced herein (e.g., any one of SEQ ID NOs: 76-101, 121-174 and 231). In one embodiment, the alpha-amylase coding sequence has at least 65%, e.g., at least 70%, at least 75%, at least 80%, at least 85%, at least 85%, at least 90%, at least 91%, at least 92%, at least 93%, at least 94%, at least 95%, at least 96%, at least 97%, at least 98%, at least 99%, or 100% sequence identity with the coding sequence from any alpha-amylase described or referenced herein (e.g., any one of SEQ ID NOs: 76-101, 121-174, 231 and 251-256).

[0361] In one embodiment, the alpha-amylase comprises the coding sequence of any alpha-amylase described or referenced herein (any one of SEQ ID NOs: 76-101, 121-174, 231 and 251-256). In one embodiment, the alpha-amylase comprises a coding sequence that is a subsequence of the coding sequence from any alpha-amylase described or referenced herein, wherein the subsequence encodes a polypeptide having alpha-amylase activity. In one embodiment, the number of nucleotides residues in the subsequence is at least 75%, e.g., at least 80%, 85%, 90%, or 95% of the number of the referenced coding sequence.

[0362] The referenced alpha-amylase coding sequence of any related aspect or embodiment described herein can be the native coding sequence or a degenerate sequence, such as a codon-optimized coding sequence designed for use in a particular host cell (e.g., optimized for expression in Saccharomyces cerevisiae).

[0363] The alpha-amylase can also include fused polypeptides or cleavable fusion polypeptides, as described supra.

[0364] Phospholipases

[0365] The host cells and fermenting organisms may express a heterologous phospholipase. The phospholipase may be any phospholipase that is suitable for the host cells, fermenting organism, and/or the methods described herein, such as a naturally occurring phospholipase (e.g., a native phospholipase from another species or an endogenous phospholipase expressed from a modified expression vector) or a variant thereof that retains phospholipase activity. Any phospholipase contemplated for expression by a host cell or fermenting organism described below is also contemplated for embodiments of the invention involving exogenous addition of a phospholipase (e.g., added before, during or after liquefaction and/or saccharification).

[0366] In some embodiments, the host cell or fermenting organism comprises a heterologous polynucleotide encoding a phospholipase, for example, as described in WO2018/075430, the content of which is hereby incorporated by reference. In some embodiments, the phospholipase is classified as a phospholipase A. In other embodiments, the phospholipase is classified as a phospholipase C. Any phospholipase described or referenced herein is contemplated for expression in the host cell or fermenting organism.

[0367] In some embodiments, the host cell or fermenting organism comprising a heterologous polynucleotide encoding a phospholipase has an increased level of phospholipase activity compared to the host cells without the heterologous polynucleotide encoding the phospholipase, when cultivated under the same conditions. In some embodiments, the host cell or fermenting organism has an increased level of phospholipase activity of at least 5%, e.g., at least 10%, at least 15%, at least 20%, at least 25%, at least 50%, at least 100%, at least 150%, at least 200%, at least 300%, or at 500% compared to the host cell or fermenting organism without the heterologous polynucleotide encoding the phospholipase, when cultivated under the same conditions.

[0368] Exemplary phospholipases that can be used with the host cells and/or the methods described herein include bacterial, yeast, or filamentous fungal phospholipases, e.g., derived from any of the microorganisms described or referenced herein.

[0369] Additional phospholipases that may be expressed with the host cells and fermenting organisms, and used with the methods described herein, and include, but are not limited to phospholipases shown in Table 3 (or derivatives thereof).

TABLE 3

| Donor Organism | SEQ ID NO: |
|---|---|
| (catalytic domain) | (mature polypeptide) |
| Thermomyces lanuginosus | 235 |
| Talaromyces leycettanus | 236 |
| Penicillium emersonii | 237 |
| Bacillus thuringiensis | 238 |
| Pseudomonas sp. | 239 |
| Kionochaeta sp. | 240 |
| Mariannaea pinicola | 241 |
| Fictibacillus macauensis | 242 |

[0370] Additional phospholipases contemplated for use with the present invention can be found in WO2018/075430 (the content of which is incorporated herein).

[0371] Additional polynucleotides encoding suitable phospholipases may be obtained from microorganisms of any genus, including those readily available within the UniProtKB database.

[0372] The phospholipase coding sequences can also be used to design nucleic acid probes to identify and clone DNA encoding phospholipases from strains of different genera or species, as described supra.

[0373] The polynucleotides encoding phospholipases may also be identified and obtained from other sources including microorganisms isolated from nature (e.g., soil, composts, water, etc.) or DNA samples obtained directly from natural materials (e.g., soil, composts, water, etc.) as described supra.

[0374] Techniques used to isolate or clone polynucleotides encoding phospholipases are described supra.

[0375] In one embodiment, the phospholipase has a mature polypeptide sequence that comprises or consists of the amino acid sequence of any one of the phospholipases described or referenced herein (e.g., any one of SEQ ID NOs: 235, 236, 237, 238, 239, 240, 241, and 242). In another embodiment, the phospholipase has a mature polypeptide sequence that is a fragment of the any one of the phospholipases described or referenced herein (e.g., any one of SEQ ID NOs: 235, 236, 237, 238, 239, 240, 241, and 242). In one embodiment, the number of amino acid residues in the fragment is at least 75%, e.g., at least 80%, 85%, 90%, or 95% of the number of amino acid residues in referenced full length phospholipase (e.g. any one of SEQ ID NOs: 235, 236, 237, 238, 239, 240, 241, and 242). In other embodiments, the phospholipase may comprise the catalytic domain of any phospholipase described or referenced herein (e.g., the catalytic domain of any one of SEQ ID NOs: 235, 236, 237, 238, 239, 240, 241, and 242).

[0376] The phospholipase may be a variant of any one of the phospholipases described supra (e.g., any one of SEQ ID NOs: SEQ ID NOs: 235, 236, 237, 238, 239, 240, 241, and 242). In one embodiment, the phospholipase has a mature polypeptide sequence of at least 60%, e.g., at least 65%, 70%, 75%, 80%, 85%, 90%, 95%, 97%, 98%, 99%, or 100% sequence identity to any one of the phospholipases described supra (e.g., any one of SEQ ID NOs: 235, 236, 237, 238, 239, 240, 241, and 242).

[0377] Examples of suitable amino acid changes, such as conservative substitutions that do not significantly affect the folding and/or activity of the phospholipase, are described herein.

[0378] In one embodiment, the phospholipase has a mature polypeptide sequence that differs by no more than ten amino acids, e.g., by no more than five amino acids, by no more than four amino acids, by no more than three amino acids, by no more than two amino acids, or by one amino acid from the amino acid sequence of any one of the phospholipases described supra (e.g., any one of SEQ ID NOs: 235, 236, 237, 238, 239, 240, 241, and 242). In one embodiment, the phospholipase has an amino acid substitution, deletion, and/or insertion of one or more (e.g., two, several) of amino acid sequence of any one of the phospholipases described supra (e.g., any one of SEQ ID NOs: 235, 236, 237, 238, 239, 240, 241, and 242). In some embodiments, the total number of amino acid substitutions, deletions and/or insertions is not more than 10, e.g., not more than 9, 8, 7, 6, 5, 4, 3, 2, or 1.

[0379] In some embodiments, the phospholipase has at least 20%, e.g., at least 40%, at least 50%, at least 60%, at least 70%, at least 80%, at least 90%, at least 95%, at least 96%, at least 97%, at least 98%, at least 99%, or 100% of the phospholipase activity of any phospholipase described or referenced herein (e.g., any one of SEQ ID NOs: 235, 236, 237, 238, 239, 240, 241, and 242) under the same conditions.

[0380] In one embodiment, the phospholipase coding sequence hybridizes under at least low stringency conditions, e.g., medium stringency conditions, medium-high stringency conditions, high stringency conditions, or very high stringency conditions with the full-length complementary strand of the coding sequence from any phospholipase described or referenced herein (e.g., a coding sequence fora phospholipase of SEQ ID NO: 235, 236, 237, 238, 239, 240, 241 or 242). In one embodiment, the phospholipase coding sequence has at least 65%, e.g., at least 70%, at least 75%, at least 80%, at least 85%, at least 85%, at least 90%, at least 91%, at least 92%, at least 93%, at least 94%, at least 95%, at least 96%, at least 97%, at least 98%, at least 99%, or 100% sequence identity with the coding sequence from any phospholipase described or referenced herein (e.g., a coding sequence for a phospholipase of SEQ ID NO: 235, 236, 237, 238, 239, 240, 241 or 242).

[0381] In one embodiment, the phospholipase comprises the coding sequence of any phospholipase described or referenced herein (e.g., a coding sequence for a phospholipase of SEQ ID NO: 235, 236, 237, 238, 239, 240, 241 or 242). In one embodiment, the phospholipase comprises a coding sequence that is a subsequence of the coding sequence from any phospholipase described or referenced herein, wherein the subsequence encodes a polypeptide having phospholipase activity. In one embodiment, the number of nucleotides residues in the subsequence is at least 75%, e.g., at least 80%, 85%, 90%, or 95% of the number of the referenced coding sequence.

[0382] The referenced phospholipase coding sequence of any related aspect or embodiment described herein can be the native coding sequence or a degenerate sequence, such as a codon-optimized coding sequence designed for use in a particular host cell (e.g., optimized for expression in Saccharomyces cerevisiae).

[0383] The phospholipase can also include fused polypeptides or cleavable fusion polypeptides, as described supra.

[0384] Trehalases

[0385] The host cells and fermenting organisms may express a heterologous trehalase. The trehalase can be any trehalase that is suitable for the host cells, fermenting organisms and/or their methods of use described herein, such as a naturally occurring trehalase or a variant thereof that retains trehalase activity. Any trehalase contemplated for expression by a host cell or fermenting organism described below is also contemplated for embodiments of the invention involving exogenous addition of a trehalase (e.g., added before, during or after liquefaction and/or saccharification).

[0386] In some embodiments, the host cell or fermenting organism comprising a heterologous polynucleotide encoding a trehalase has an increased level of trehalase activity compared to the host cells without the heterologous polynucleotide encoding the trehalase, when cultivated under the same conditions. In some embodiments, the host cell or fermenting organism has an increased level of trehalase activity of at least 5%, e.g., at least 10%, at least 15%, at least 20%, at least 25%, at least 50%, at least 100%, at least 150%, at least 200%, at least 300%, or at 500% compared to the host cell or fermenting organism without the heterologous polynucleotide encoding the trehalase, when cultivated under the same conditions.

[0387] Trehalases that may be expressed with the host cells and fermenting organisms, and used with the methods described herein include, but are not limited to, trehalases shown in Table 4 (or derivatives thereof).

TABLE 4

| Donor Organism | SEQ ID NO: |
|---|---|
| (catalytic domain) | (mature polypeptide) |
| Chaetomium megalocarpum | 175 |
| Lecanicillium psalliotae | 176 |
| Doratomyces sp | 177 |
| Mucor moelleri | 178 |
| Phialophora cyclaminis | 179 |
| Thielavia arenaria | 180 |
| Thielavia antarctica | 181 |
| Chaetomium sp | 182 |
| Chaetomium nigricolor | 183 |
| Chaetomium jodhpurense | 184 |
| Chaetomium piluliferum | 185 |
| Myceliophthora hinnulea | 186 |
| Chloridium virescens | 187 |
| Gelasinospora cratophora | 188 |
| Acidobacteriaceae bacterium | 189 |
| Acidobacterium capsulatum | 190 |
| Acidovorax wautersii | 191 |
| Xanthomonas arboricola | 192 |
| Kosakonia sacchari | 193 |
| Enterobacter sp | 194 |
| Saitozyma flava | 195 |
| Phaeotremella skinneri | 196 |
| Trichoderma asperellum | 197 |
| Corynascus sepedonium | 198 |
| Myceliophthora thermophila | 199 |
| Trichoderma reesei | 200 |
| Chaetomium virescens | 201 |
| Rhodothermus marinus | 202 |
| Myceliophthora sepedonium | 203 |
| Moelleriella libera | 204 |
| Acremonium dichromosporum | 205 |
| Fusarium sambucinum | 206 |
| Phoma sp | 207 |
| Lentinus similis | 208 |
| Diaporthe nobilis | 209 |
| Solicoccozyma terricola | 210 |
| Dioszegia cryoxerica | 211 |
| Talaromyces funiculosus | 212 |
| Hamigera avellanea | 213 |
| Talaromyces ruber | 214 |
| Trichoderma lixii | 215 |
| Aspergillus cervinus | 216 |
| Rasamsonia brevistipitata | 217 |
| Acremonium curvulum | 218 |
| Talaromyces piceae | 219 |
| Penicillium sp | 220 |
| Talaromyces aurantiacus | 221 |
| Talaromyces pinophilus | 222 |
| Talaromyces leycettanus | 223 |
| Talaromyces variabilis | 224 |
| Aspergillus niger | 225 |
| Trichoderma reesei | 226 |

[0388] Additional polynucleotides encoding suitable trehalases may be derived from microorganisms of any suitable genus, including those readily available within the UniProtKB database.

[0389] The trehalase coding sequences can also be used to design nucleic acid probes to identify and clone DNA encoding trehalases from strains of different genera or species, as described supra.

[0390] The polynucleotides encoding trehalases may also be identified and obtained from other sources including microorganisms isolated from nature (e.g., soil, composts, water, etc.) or DNA samples obtained directly from natural materials (e.g., soil, composts, water, etc.) as described supra.

[0391] Techniques used to isolate or clone polynucleotides encoding trehalases are described supra.

[0392] In one embodiment, the trehalase has a mature polypeptide sequence that comprises or consists of the amino acid sequence of any one of the trehalases described or referenced herein (e.g., any one of SEQ ID NOs: 175-226). In another embodiment, the trehalase has a mature polypeptide sequence that is a fragment of the any one of the trehalases described or referenced herein (e.g., any one of SEQ ID NOs: 175-226). In one embodiment, the number of amino acid residues in the fragment is at least 75%, e.g., at least 80%, 85%, 90%, or 95% of the number of amino acid residues in referenced full length trehalase (e.g. any one of SEQ ID NOs: 175-226). In other embodiments, the trehalase may comprise the catalytic domain of any trehalase described or referenced herein (e.g., the catalytic domain of any one of SEQ ID NOs: 175-226).

[0393] The trehalase may be a variant of any one of the trehalases described supra (e.g., any one of SEQ ID NOs: 175-226). In one embodiment, the trehalase has a mature polypeptide sequence of at least 60%, e.g., at least 65%, 70%, 75%, 80%, 85%, 90%, 95%, 97%, 98%, 99%, or 100% sequence identity to any one of the trehalases described supra (e.g., any one of SEQ ID NOs: 175-226).

[0394] Examples of suitable amino acid changes, such as conservative substitutions that do not significantly affect the folding and/or activity of the trehalase, are described herein.

[0395] In one embodiment, the trehalase has a mature polypeptide sequence that differs by no more than ten amino acids, e.g., by no more than five amino acids, by no more than four amino acids, by no more than three amino acids, by no more than two amino acids, or by one amino acid from the amino acid sequence of any one of the trehalases described supra (e.g., any one of SEQ ID NOs: 175-226). In one embodiment, the trehalase has an amino acid substitution, deletion, and/or insertion of one or more (e.g., two, several) of amino acid sequence of any one of the trehalases described supra (e.g., any one of SEQ ID NOs: 175-226). In some embodiments, the total number of amino acid substitutions, deletions and/or insertions is not more than 10, e.g., not more than 9, 8, 7, 6, 5, 4, 3, 2, or 1.

[0396] In some embodiments, the trehalase has at least 20%, e.g., at least 40%, at least 50%, at least 60%, at least 70%, at least 80%, at least 90%, at least 95%, at least 96%, at least 97%, at least 98%, at least 99%, or 100% of the trehalase activity of any trehalase described or referenced herein (e.g., any one of SEQ ID NOs: 175-226) under the same conditions.

[0397] In one embodiment, the trehalase coding sequence hybridizes under at least low stringency conditions, e.g., medium stringency conditions, medium-high stringency conditions, high stringency conditions, or very high stringency conditions with the full-length complementary strand of the coding sequence from any trehalase described or referenced herein (e.g., any one of SEQ ID NOs: 175-226). In one embodiment, the trehalase coding sequence has at least 65%, e.g., at least 70%, at least 75%, at least 80%, at least 85%, at least 85%, at least 90%, at least 91%, at least 92%, at least 93%, at least 94%, at least 95%, at least 96%, at least 97%, at least 98%, at least 99%, or 100% sequence identity with the coding sequence from any trehalase described or referenced herein (e.g., any one of SEQ ID NOs: 175-226).

[0398] In one embodiment, the trehalase comprises the coding sequence of any trehalase described or referenced herein (any one of SEQ ID NOs: 175-226). In one embodiment, the trehalase comprises a coding sequence that is a subsequence of the coding sequence from any trehalase described or referenced herein, wherein the subsequence encodes a polypeptide having trehalase activity. In one embodiment, the number of nucleotides residues in the subsequence is at least 75%, e.g., at least 80%, 85%, 90%, or 95% of the number of the referenced coding sequence.

[0399] The referenced trehalase coding sequence of any related aspect or embodiment described herein can be the native coding sequence or a degenerate sequence, such as a codon-optimized coding sequence designed for use in a particular host cell (e.g., optimized for expression in Saccharomyces cerevisiae).

[0400] The trehalase can also include fused polypeptides or cleavable fusion polypeptides, as described supra.

[0401] Proteases

[0402] The host cells and fermenting organisms may express a heterologous protease. The protease can be any protease that is suitable for the host cells and fermenting organisms and/or their methods of use described herein, such as a naturally occurring protease or a variant thereof that retains protease activity. Any protease contemplated for expression by a host cell or fermenting organism described below is also contemplated for embodiments of the invention involving exogenous addition of a protease (e.g., added before, during or after liquefaction and/or saccharification).

[0403] Proteases are classified on the basis of their catalytic mechanism into the following groups: Serine proteases (S), Cysteine proteases (C), Aspartic proteases (A), Metallo proteases (M), and Unknown, or as yet unclassified, proteases (U), see Handbook of Proteolytic Enzymes, A. J. Barrett, N. D. Rawlings, J. F. Woessner (eds), Academic Press (1998), in particular the general introduction part.

[0404] Protease activity can be measured using any suitable assay, in which a substrate is employed, that includes peptide bonds relevant for the specificity of the protease in question. Assay-pH and assay-temperature are likewise to be adapted to the protease in question. Examples of assay-pH-values are pH 6, 7, 8, 9, 10, or 11. Examples of assay-temperatures are 30, 35, 37, 40, 45, 50, 55, 60, 65, 70 or 80° C.

[0405] In some embodiments, the host cell or fermenting organism comprising a heterologous polynucleotide encoding a protease has an increased level of protease activity compared to the host cell or fermenting organism without the heterologous polynucleotide encoding the protease, when cultivated under the same conditions. In some embodiments, the host cell or fermenting organism has an increased level of protease activity of at least 5%, e.g., at least 10%, at least 15%, at least 20%, at least 25%, at least 50%, at least 100%, at least 150%, at least 200%, at least 300%, or at 500% compared to the host cell or fermenting organism without the heterologous polynucleotide encoding the protease, when cultivated under the same conditions.

[0406] Exemplary proteases that may be expressed with the host cells and fermenting organisms, and used with the methods described herein include, but are not limited to, proteases shown in Table 5 (or derivatives thereof).

TABLE 5

| Donor Organism | SEQ ID NO: | |
|---|---|---|
| (catalytic domain) | (mature polypeptide) | Family |
| Aspergillus niger | 9 | A1 |
| Trichoderma reesei | 10 | |
| Thermoascus aurantiacus | 11 | M35 |
| Dichomitus squalens | 12 | S53 |
| Nocardiopsis prasina | 13 | S1 |
| Penicillium simplicissimum | 14 | S10 |
| Aspergillus niger | 15 | |
| Meriphilus giganteus | 16 | S53 |
| Lecanicillium sp. WMM742 | 17 | S53 |
| Talaromyces proteolyticus | 18 | S53 |
| Penicillium ranomafanaense | 19 | A1A |
| Aspergillus oryzae | 20 | S53 |
| Talaromyces liani | 21 | S10 |
| Thermoascus thermophilus | 22 | S53 |
| Pyrococcus furiosus | 23 | |
| Trichoderma reesei | 24 | |
| Rhizomucor miehei | 25 | |
| Lenzites betulinus | 26 | S53 |
| Neolentinus lepideus | 27 | S53 |
| Thermococcus sp. | 28 | S8 |
| Thermococcus sp. | 29 | S8 |
| Thermomyces lanuginosus | 30 | S53 |
| Thermococcus thioreducens | 31 | S53 |
| Polyporus arcularius | 32 | S53 |
| Ganoderma lucidum | 33 | S53 |
| Ganoderma lucidum | 34 | S53 |
| Ganoderma lucidum | 35 | S53 |
| Trametes sp. AH28-2 | 36 | S53 |
| Cinereomyces lindbladii | 37 | S53 |
| Trametes versicolor O82DDP | 38 | S53 |
| Paecilomyces hepiali | 39 | S53 |
| Isaria tenuipes | 40 | S53 |
| Aspergillus tamarii | 41 | S53 |
| Aspergillus brasiliensis | 42 | S53 |
| Aspergillus iizukae | 43 | S53 |
| Penicillium sp-72364 | 44 | S10 |
| Aspergillus denticulatus | 45 | S10 |
| Hamigera sp. t184-6 | 46 | S10 |
| Penicillium janthinellum | 47 | S10 |
| Penicillium vasconiae | 48 | S10 |
| Hamigera paravellanea | 49 | S10 |
| Talaromyces variabilis | 50 | S10 |
| Penicillium arenicola | 51 | S10 |
| Nocardiopsis kunsanensis | 52 | S1 |
| Streptomyces parvulus | 53 | S1 |
| Saccharopolyspora endophytica | 54 | S1 |
| luteus cell wall enrichments K | 55 | S1 |
| Saccharothrix australiensis | 56 | S1 |
| Nocardiopsis baichengensis | 57 | S1 |
| Streptomyces sp. SM15 | 58 | S1 |
| Actinoalloteichus spitiensis | 59 | S1 |
| Byssochlamys verrucosa | 60 | M35 |
| Hamigera terricola | 61 | M35 |
| Aspergillus tamarii | 62 | M35 |
| Aspergillus niveus | 63 | M35 |
| Penicillium sclerotiorum | 64 | A1 |
| Penicillium bilaiae | 65 | A1 |
| Penicillium antarcticum | 66 | A1 |
| Penicillium sumatrense | 67 | A1 |
| Trichoderma lixii | 68 | A1 |
| Trichoderma brevicompactum | 69 | A1 |
| Penicillium cinnamopurpureum | 70 | A1 |
| Bacillus licheniformis | 71 | S8 |
| Bacillus subtilis | 72 | S8 |
| Trametes cf versicol | 73 | S53 |

[0407] Additional polynucleotides encoding suitable proteases may be derived from microorganisms of any suitable genus, including those readily available within the UniProtKB database.

[0408] In one embodiment, the protease is derived from Aspergillus, such as the Aspergillus niger protease of SEQ ID NO: 9, the Aspergillus tamarii protease of SEQ ID NO: 41, or the Aspergillus denticulatus protease of SEQ ID NO: 45. In one embodiment, the protease is derived from Dichomitus, such as the Dichomitus squalens protease of SEQ ID NO: 12. In one embodiment, the protease is derived from Penicillium, such as the Penicillium simplicissimum protease of SEQ ID NO: 14, the Penicillium antarcticum protease of SEQ ID NO: 66, or the Penicillium sumatrense protease of SEQ ID NO: 67. In one embodiment, the protease is derived from Meriphilus, such as the Meriphilus giganteus protease of SEQ ID NO: 16. In one embodiment, the protease is derived from Talaromyces, such as the Talaromyces liani protease of SEQ ID NO: 21. In one embodiment, the protease is derived from Thermoascus, such as the Thermoascus thermophilus protease of SEQ ID NO: 22. In one embodiment, the protease is derived from Ganoderma, such as the Ganoderma lucidum protease of SEQ ID NO: 33. In one embodiment, the protease is derived from Hamigera, such as the Hamigera terricola protease of SEQ ID NO: 61. In one embodiment, the protease is derived from Trichoderma, such as the Trichoderma brevicompactum protease of SEQ ID NO: 69.

[0409] The protease coding sequences can also be used to design nucleic acid probes to identify and clone DNA encoding proteases from strains of different genera or species, as described supra.

[0410] The polynucleotides encoding proteases may also be identified and obtained from other sources including microorganisms isolated from nature (e.g., soil, composts, water, etc.) or DNA samples obtained directly from natural materials (e.g., soil, composts, water, etc.) as described supra.

[0411] Techniques used to isolate or clone polynucleotides encoding proteases are described supra.

[0412] In one embodiment, the protease has a mature polypeptide sequence that comprises or consists of the amino acid sequence of any one of SEQ ID NOs: 9-73 (e.g., any one of SEQ ID NOs: 9, 14, 16, 21, 22, 33, 41, 45, 61, 62, 66, 67, and 69; such as any one of SEQ NOs: 9, 14, 16, and 69). In another embodiment, the protease has a mature polypeptide sequence that is a fragment of the protease of any one of SEQ ID NOs: 9-73 (e.g., wherein the fragment has protease activity). In one embodiment, the number of amino acid residues in the fragment is at least 75%, e.g., at least 80%, 85%, 90%, or 95% of the number of amino acid residues in referenced full length protease (e.g. any one of SEQ ID NOs: 9-73). In other embodiments, the protease may comprise the catalytic domain of any protease described or referenced herein (e.g., the catalytic domain of any one of SEQ ID NOs: 9-73).

[0413] The protease may be a variant of any one of the proteases described supra (e.g., any one of SEQ ID NOs: 9-73. In one embodiment, the protease has a mature polypeptide sequence of at least 60%, e.g., at least 65%, 70%, 75%, 80%, 85%, 90%, 95%, 97%, 98%, 99%, or 100% sequence identity to any one of the proteases described supra (e.g., any one of SEQ ID NOs: 9-73).

[0414] Examples of suitable amino acid changes, such as conservative substitutions that do not significantly affect the folding and/or activity of the protease, are described herein.

[0415] In one embodiment, the protease has a mature polypeptide sequence that differs by no more than ten amino acids, e.g., by no more than five amino acids, by no more than four amino acids, by no more than three amino acids, by no more than two amino acids, or by one amino acid from the amino acid sequence of any one of the proteases described supra (e.g., any one of SEQ ID NOs: 9-73). In one embodiment, the protease has an amino acid substitution, deletion, and/or insertion of one or more (e.g., two, several) of amino acid sequence of any one of the proteases described supra (e.g., any one of SEQ ID NOs: 9-73). In some embodiments, the total number of amino acid substitutions, deletions and/or insertions is not more than 10, e.g., not more than 9, 8, 7, 6, 5, 4, 3, 2, or 1.

[0416] In one embodiment, the protease coding sequence hybridizes under at least low stringency conditions, e.g., medium stringency conditions, medium-high stringency conditions, high stringency conditions, or very high stringency conditions with the full-length complementary strand of the coding sequence from any protease described or referenced herein (e.g., any one of SEQ ID NOs: 9-73). In one embodiment, the protease coding sequence has at least 65%, e.g., at least 70%, at least 75%, at least 80%, at least 85%, at least 85%, at least 90%, at least 91%, at least 92%, at least 93%, at least 94%, at least 95%, at least 96%, at least 97%, at least 98%, at least 99%, or 100% sequence identity with the coding sequence from any protease described or referenced herein (e.g., any one of SEQ ID NOs: 9-73).

[0417] In one embodiment, the protease comprises the coding sequence of any protease described or referenced herein (any one of SEQ ID NOs: 9-73). In one embodiment, the protease comprises a coding sequence that is a subsequence of the coding sequence from any protease described or referenced herein, wherein the subsequence encodes a polypeptide having protease activity. In one embodiment, the number of nucleotides residues in the subsequence is at least 75%, e.g., at least 80%, 85%, 90%, or 95% of the number of the referenced coding sequence.

[0418] The referenced protease coding sequence of any related aspect or embodiment described herein can be the native coding sequence or a degenerate sequence, such as a codon-optimized coding sequence designed for use in a particular host cell (e.g., optimized for expression in Saccharomyces cerevisiae).

[0419] The protease can also include fused polypeptides or cleavable fusion polypeptides, as described supra.

[0420] In one embodiment, the protease used according to a process described herein is a Serine proteases. In one particular embodiment, the protease is a serine protease belonging to the family 53, e.g., an endo-protease, such as S53 protease from Meriphilus giganteus, Dichomitus squalens Trametes versicolor, Polyporus arcularius, Lenzites betulinus, Ganoderma lucidum, Neolentinus lepideus, or Bacillus sp. 19138, in a process for producing ethanol from a starch-containing material, the ethanol yield was improved, when the S53 protease was present/or added during saccharification and/or fermentation of either gelatinized or un-gelatinized starch. In one embodiment, the proteases is selected from: (a) proteases belonging to the EC 3.4.21 enzyme group; and/or (b) proteases belonging to the EC 3.4.14 enzyme group; and/or (c) Serine proteases of the peptidase family S53 that comprises two different types of peptidases: tripeptidyl aminopeptidases (exo-type) and endopeptidases; as described in 1993, Biochem. J. 290:205-218 and in MEROPS protease database, release, 9.4 (31 Jan. 2011) (www.merops.ac.uk). The database is described in Rawlings, N. D., Barrett, A. J. and Bateman, A., 2010, “MEROPS: the peptidase database”, Nucl. Acids Res. 38: D227-D233.

[0421] For determining whether a given protease is a Serine protease, and a family S53 protease, reference is made to the above Handbook and the principles indicated therein. Such determination can be carried out for all types of proteases, be it naturally occurring or wild-type proteases; or genetically engineered or synthetic proteases.

[0422] Peptidase family S53 contains acid-acting endopeptidases and tripeptidyl-peptidases. The residues of the catalytic triad are Glu, Asp, Ser, and there is an additional acidic residue, Asp, in the oxyanion hole. The order of the residues is Glu, Asp, Asp, Ser. The Ser residue is the nucleophile equivalent to Ser in the Asp, His, Ser triad of subtilisin, and the Glu of the triad is a substitute for the general base, His, in subtilisin.

[0423] The peptidases of the S53 family tend to be most active at acidic pH (unlike the homologous subtilisins), and this can be attributed to the functional importance of carboxylic residues, notably Asp in the oxyanion hole. The amino acid sequences are not closely similar to those in family S8 (i.e. serine endopeptidase subtilisins and homologues), and this, taken together with the quite different active site residues and the resulting lower pH for maximal activity, provides for a substantial difference to that family. Protein folding of the peptidase unit for members of this family resembles that of subtilisin, having the clan type SB.

[0424] In one embodiment, the protease used according to a process described herein is a Cysteine proteases.

[0425] In one embodiment, the protease used according to a process described herein is a Aspartic proteases. Aspartic acid proteases are described in, for example, Hand-book of Proteolytic En-zymes, Edited by A. J. Barrett, N. D. Rawlings and J. F. Woessner, Academic Press, San Diego, 1998, Chapter 270). Suitable examples of aspartic acid protease include, e.g., those disclosed in R. M. Berka et al. Gene, 96, 313 (1990)); (R. M. Berka et al. Gene, 125, 195-198 (1993)); and Gomi et al. Biosci. Biotech. Biochem. 57, 1095-1100 (1993), which are hereby incorporated by reference.

[0426] The protease also may be a metalloprotease, which is defined as a protease selected from the group consisting of:

[0427] (a) proteases belonging to EC 3.4.24 (metalloendopeptidases); preferably EC 3.4.24.39 (acid metallo proteinases);

[0428] (b) metalloproteases belonging to the M group of the above Handbook;

[0429] (c) metalloproteases not yet assigned to clans (designation: Clan MX), or belonging to either one of clans MA, MB, MC, MD, ME, MF, MG, MH (as defined at pp. 989-991 of the above Handbook);

[0430] (d) other families of metalloproteases (as defined at pp. 1448-1452 of the above Handbook);

[0431] (e) metalloproteases with a HEXXH motif;

[0432] (f) metalloproteases with an HEFTH motif;

[0433] (g) metalloproteases belonging to either one of families M3, M26, M27, M32, M34, M35, M36, M41, M43, or M47 (as defined at pp. 1448-1452 of the above Handbook);

[0434] (h) metalloproteases belonging to the M28E family; and

[0435] (i) metalloproteases belonging to family M35 (as defined at pp. 1492-1495 of the above Handbook).

[0436] In other particular embodiments, metalloproteases are hydrolases in which the nucleophilic attack on a peptide bond is mediated by a water molecule, which is activated by a divalent metal cation. Examples of divalent cations are zinc, cobalt or manganese. The metal ion may be held in place by amino acid ligands. The number of ligands may be five, four, three, two, one or zero. In a particular embodiment the number is two or three, preferably three.

[0437] There are no limitations on the origin of the metalloprotease used in a process of the invention. In an embodiment the metalloprotease is classified as EC 3.4.24, preferably EC 3.4.24.39. In one embodiment, the metalloprotease is an acid-stable metalloprotease, e.g., a fungal acid-stable metalloprotease, such as a metalloprotease derived from a strain of the genus Thermoascus, preferably a strain of Thermoascus aurantiacus, especially Thermoascus aurantiacus CGMCC No. 0670 (classified as EC 3.4.24.39). In another embodiment, the metalloprotease is derived from a strain of the genus Aspergillus, preferably a strain of Aspergillus oryzae.

[0438] In one embodiment the metalloprotease has a degree of sequence identity to amino acids −178 to 177, −159 to 177, or preferably amino acids 1 to 177 (the mature polypeptide) of SEQ ID NO: 1 of WO2010/008841 (a Thermoascus aurantiacus metalloprotease) of at least 80%, at least 82%, at least 85%, at least 90%, at least 95%, or at least 97%; and which have metalloprotease activity. In particular embodiments, the metalloprotease consists of an amino acid sequence with a degree of identity to SEQ ID NO: 1 as mentioned above.

[0439] The Thermoascus aurantiacus metalloprotease is a preferred example of a metalloprotease suitable for use in a process of the invention. Another metalloprotease is derived from Aspergillus oryzae and comprises the sequence of SEQ ID NO: 11 disclosed in WO2003/048353, or amino acids −23-353; −23-374; −23-397; 1-353; 1-374; 1-397; 177-353; 177-374; or 177-397 thereof, and SEQ ID NO: 10 disclosed in WO2003/048353.

[0440] Another metalloprotease suitable for use in a process of the invention is the Aspergillus oryzae metalloprotease comprising SEQ ID NO: 5 of WO2010/008841, or a metalloprotease is an isolated polypeptide which has a degree of identity to SEQ ID NO: 5 of at least about 80%, at least 82%, at least 85%, at least 90%, at least 95%, or at least 97%; and which have metalloprotease activity. In particular embodiments, the metalloprotease consists of the amino acid sequence of SEQ ID NO: 5 of WO2010/008841.

[0441] In a particular embodiment, a metalloprotease has an amino acid sequence that differs by forty, thirty-five, thirty, twenty-five, twenty, or by fifteen amino acids from amino acids −178 to 177, −159 to 177, or +1 to 177 of the amino acid sequences of the Thermoascus aurantiacus or Aspergillus oryzae metalloprotease.

[0442] In another embodiment, a metalloprotease has an amino acid sequence that differs by ten, or by nine, or by eight, or by seven, or by six, or by five amino acids from amino acids −178 to 177, −159 to 177, or +1 to 177 of the amino acid sequences of these metalloproteases, e.g., by four, by three, by two, or by one amino acid.

[0443] In particular embodiments, the metalloprotease a) comprises or b) consists of

[0444] i) the amino acid sequence of amino acids −178 to 177, −159 to 177, or +1 to 177 of SEQ ID NO:1 of WO2010/008841;

[0445] ii) the amino acid sequence of amino acids −23-353, −23-374, −23-397, 1-353, 1-374, 1-397, 177-353, 177-374, or 177-397 of SEQ ID NO: 3 of WO2010/008841;

[0446] iii) the amino acid sequence of SEQ ID NO: 5 of WO2010/008841; or allelic variants, or fragments, of the sequences of i), ii), and iii) that have protease activity.

[0447] A fragment of amino acids −178 to 177, −159 to 177, or +1 to 177 of SEQ ID NO: 1 of WO2010/008841 or of amino acids −23-353, −23-374, −23-397, 1-353, 1-374, 1-397, 177-353, 177-374, or 177-397 of SEQ ID NO: 3 of WO2010/008841; is a polypeptide having one or more amino acids deleted from the amino and/or carboxyl terminus of these amino acid sequences. In one embodiment a fragment contains at least 75 amino acid residues, or at least 100 amino acid residues, or at least 125 amino acid residues, or at least 150 amino acid residues, or at least 160 amino acid residues, or at least 165 amino acid residues, or at least 170 amino acid residues, or at least 175 amino acid residues.

[0448] To determine whether a given protease is a metallo protease or not, reference is made to the above “Handbook of Proteolytic Enzymes” and the principles indicated therein. Such determination can be carried out for all types of proteases, be it naturally occurring or wild-type proteases; or genetically engineered or synthetic proteases.

[0449] The protease may be a variant of, e.g., a wild-type protease, having thermostability properties defined herein. In one embodiment, the thermostable protease is a variant of a metallo protease. In one embodiment, the thermostable protease used in a process described herein is of fungal origin, such as a fungal metallo protease, such as a fungal metallo protease derived from a strain of the genus Thermoascus, preferably a strain of Thermoascus aurantiacus, especially Thermoascus aurantiacus CGMCC No. 0670 (classified as EC 3.4.24.39).

[0450] In one embodiment, the thermostable protease is a variant of the mature part of the metallo protease shown in SEQ ID NO: 2 disclosed in WO2003/048353 or the mature part of SEQ ID NO: 1 in WO2010/008841 further with one of the following substitutions or combinations of substitutions:

[0451] S5*+D79L+S87P+A112P+D142L;

[0452] D79L+S87P+A112P+T124V+D142L;

[0453] S5*+N26R+D79L+S87P+A112P+D142L;

[0454] N26R+T46R+D79L+S87P+A112P+D142L;

[0455] T46R+D79L+S87P+T116V+D142L;

[0456] D79L+P81R+S87P+A112P+D142L;

[0457] A27K+D79L+S87P+A112P+T124V+D142L;

[0458] D79L+Y82F+S87P+A112P+T124V+D142L;

[0459] D79L+Y82F+S87P+A112P+T124V+D142L;

[0460] D79L+S87P+A112P+T124V+A126V+D142L;

[0461] D79L+S87P+A112P+D142L;

[0462] D79L+Y82F+S87P+A112P+D142L;

[0463] S38T+D79L+S87P+A112P+A126V+D142L;

[0464] D79L+Y82F+S87P+A112P+A126V+D142L;

[0465] A27K+D79L+S87P+A112P+A126V+D142L;

[0466] D79L+S87P+N98C+A112P+G135C+D142L;

[0467] D79L+S87P+A112P+D142L+T141C+M1610;

[0468] S36P+D79L+S87P+A112P+D142L;

[0469] A37P+D79L+S87P+A112P+D142L;

[0470] S49P+D79L+S87P+A112P+D142L;

[0471] S50P+D79L+S87P+A112P+D142L;

[0472] D79L+S87P+D104P+A112P+D142L;

[0473] D79L+Y82F+S87G+A112P+D142L;

[0474] 570V+D79L+Y82F+S87G+Y97W+A112P+D142L;

[0475] D79L+Y82F+S87G+Y97W+D104P+A112P+D142L;

[0476] S70V+D79L+Y82F+S87G+A112P+D142L;

[0477] D79L+Y82F+S87G+D104P+A112P+D142L;

[0478] D79L+Y82F+S87G+A112P+A126V+D142L;

[0479] Y82F+S87G+S70V+D79L+D104P+A112P+D142L;

[0480] Y82F+S87G+D79L+D104P+A112P+A126V+D142L;

[0481] A27K+D79L+Y82F+S87G+D104P+A112P+A126V+D142L;

[0482] A27K+Y82F+S87G+D104P+A112P+A126V+D142L;

[0483] A27K+D79L+Y82F+D104P+A112P+A126V+D142L;

[0484] A27K+Y82F+D104P+A112P+A126V+D142L;

[0485] A27K+D79L+S87P+A112P+D142L; and

[0486] D79L+S87P+D142L.

[0487] In one embodiment, the thermostable protease is a variant of the metallo protease disclosed as the mature part of SEQ ID NO: 2 disclosed in WO2003/048353 or the mature part of SEQ ID NO: 1 in WO2010/008841 with one of the following substitutions or combinations of substitutions:

[0488] D79L+S87P+A112P+D142L;

[0489] D79L+S87P+D142L; and

[0490] A27K+D79L+Y82F+S87G+D104P+A112P+A126V+D142L.

[0491] In one embodiment, the protease variant has at least 75% identity preferably at least 80%, more preferably at least 85%, more preferably at least 90%, more preferably at least 91%, more preferably at least 92%, even more preferably at least 93%, most preferably at least 94%, and even most preferably at least 95%, such as even at least 96%, at least 97%, at least 98%, at least 99%, but less than 100% identity to the mature part of the polypeptide of SEQ ID NO: 2 disclosed in WO2003/048353 or the mature part of SEQ ID NO: 1 in WO2010/008841.

[0492] The thermostable protease may also be derived from any bacterium as long as the protease has the thermostability properties.

[0493] In one embodiment, the thermostable protease is derived from a strain of the bacterium Pyrococcus, such as a strain of Pyrococcus furiosus (pfu protease).

[0494] In one embodiment, the protease is one shown as SEQ ID NO: 1 in U.S. Pat. No. 6,358,726 (Takara Shuzo Company).

[0495] In one embodiment, the thermostable protease is a protease having a mature polypeptide sequence of at least 80% identity, such as at least 85%, such as at least 90%, such as at least 95%, such as at least 96%, such as at least 97%, such as at least 98%, such as at least 99% identity to SEQ ID NO: 1 in U.S. Pat. No. 6,358,726. The Pyroccus furiosus protease can be purchased from Takara Bio, Japan.

[0496] The Pyrococcus furiosus protease may be a thermostable protease as described in SEQ ID NO: 13 of WO2018/098381. This protease (PfuS) was found to have a thermostability of 110% (80° C./70° C.) and 103% (90° C./70° C.) at pH 4.5 determined.

[0497] In one embodiment a thermostable protease used in a process described herein has a thermostability value of more than 20% determined as Relative Activity at 80° C./70° C. determined as described in Example 2 of WO2018/098381.

[0498] In one embodiment, the protease has a thermostability of more than 30%, more than 40%, more than 50%, more than 60%, more than 70%, more than 80%, more than 90%, more than 100%, such as more than 105%, such as more than 110%, such as more than 115%, such as more than 120% determined as Relative Activity at 80° C./70° C.

[0499] In one embodiment, protease has a thermostability of between 20 and 50%, such as between 20 and 40%, such as 20 and 30% determined as Relative Activity at 80° C./70° C. In one embodiment, the protease has a thermostability between 50 and 115%, such as between 50 and 70%, such as between 50 and 60%, such as between 100 and 120%, such as between 105 and 115% determined as Relative Activity at 80° C./70° C.

[0500] In one embodiment, the protease has a thermostability value of more than 10% determined as Relative Activity at 85° C./70° C. determined as described in Example 2 of WO2018/098381.

[0501] In one embodiment, the protease has a thermostability of more than 10%, such as more than 12%, more than 14%, more than 16%, more than 18%, more than 20%, more than 30%, more than 40%, more that 50%, more than 60%, more than 70%, more than 80%, more than 90%, more than 100%, more than 110% determined as Relative Activity at 85° C./70° C.

[0502] In one embodiment, the protease has a thermostability of between 10% and 50%, such as between 10% and 30%, such as between 10% and 25% determined as Relative Activity at 85° C./70° C.

[0503] In one embodiment, the protease has more than 20%, more than 30%, more than 40%, more than 50%, more than 60%, more than 70%, more than 80%, more than 90% determined as Remaining Activity at 80° C.; and/or the protease has more than 20%, more than 30%, more than 40%, more than 50%, more than 60%, more than 70%, more than 80%, more than 90% determined as Remaining Activity at 84° C.

[0504] Determination of “Relative Activity” and “Remaining Activity” is done as described in Example 2 of WO2018/098381.

[0505] In one embodiment, the protease may have a thermostability for above 90, such as above 100 at 85° C. as determined using the Zein-BCA assay as disclosed in Example 3 of WO2018/098381.

[0506] In one embodiment, the protease has a thermostability above 60%, such as above 90%, such as above 100%, such as above 110% at 85° C. as determined using the Zein-BCA assay of WO2018/098381.

[0507] In one embodiment, protease has a thermostability between 60-120, such as between 70-120%, such as between 80-120%, such as between 90-120%, such as between 100-120%, such as 110-120% at 85° C. as determined using the Zein-BCA assay of WO2018/098381.

[0508] In one embodiment, the thermostable protease has at least 20%, such as at least 30%, such as at least 40%, such as at least 50%, such as at least 60%, such as at least 70%, such as at least 80%, such as at least 90%, such as at least 95%, such as at least 100% of the activity of the JTP196 protease variant or Protease Pfu determined by the AZCL-casein assay of WO2018/098381, and described herein.

[0509] In one embodiment, the thermostable protease has at least 20%, such as at least 30%, such as at least 40%, such as at least 50%, such as at least 60%, such as at least 70%, such as at least 80%, such as at least 90%, such as at least 95%, such as at least 100% of the protease activity of the Protease 196 variant or Protease Pfu determined by the AZCL-casein assay of WO2018/098381.

[0510] Pullulanases

[0511] The host cells and fermenting organisms may express a heterologous pullulanase. The pullulanase can be any protease that is suitable for the host cells and fermenting organisms and/or their methods of use described herein, such as a naturally occurring pullulanase or a variant thereof that retains pullulanase activity. Any pullulanase contemplated for expression by a host cell or fermenting organism described below is also contemplated for embodiments of the invention involving exogenous addition of a pullulanase (e.g., added before, during or after liquefaction and/or saccharification).

[0512] In some embodiments, the host cell or fermenting organism comprising a heterologous polynucleotide encoding a pullulanase has an increased level of pullulanase activity compared to the host cells without the heterologous polynucleotide encoding the pullulanase, when cultivated under the same conditions. In some embodiments, the host cell or fermenting organism has an increased level of pullulanase activity of at least 5%, e.g., at least 10%, at least 15%, at least 20%, at least 25%, at least 50%, at least 100%, at least 150%, at least 200%, at least 300%, or at 500% compared to the host cell or fermenting organism without the heterologous polynucleotide encoding the pullulanase, when cultivated under the same conditions.

[0513] Exemplary pullulanases that can be used with the host cells and/or the methods described herein include bacterial, yeast, or filamentous fungal pullulanases, e.g., obtained from any of the microorganisms described or referenced herein.

[0514] Contemplated pullulanases include the pullulanases from Bacillus amyloderamificans disclosed in U.S. Pat. No. 4,560,651 (hereby incorporated by reference), the pullulanase disclosed as SEQ ID NO: 2 in WO01/151620 (hereby incorporated by reference), the Bacillus deramificans disclosed as SEQ ID NO: 4 in WO01/151620 (hereby incorporated by reference), and the pullulanase from Bacillus acidopullulyticus disclosed as SEQ ID NO: 6 in WO01/151620 (hereby incorporated by reference) and also described in FEMS Mic. Let. (1994) 115, 97-106.

[0515] Additional pullulanases contemplated include the pullulanases from Pyrococcus woesei, specifically from Pyrococcus woesei DSM No. 3773 disclosed in WO92/02614.

[0516] In one embodiment, the pullulanase is a family GH57 pullulanase. In one embodiment, the pullulanase includes an X47 domain as disclosed in U.S. 61/289,040 published as WO2011/087836 (which are hereby incorporated by reference). More specifically the pullulanase may be derived from a strain of the genus Thermococcus, including Thermococcus litoralis and Thermococcus hydrothermalis, such as the Thermococcus hydrothermalis pullulanase truncated at site X4 right after the X47 domain (i.e., amino acids 1-782). The pullulanase may also be a hybrid of the Thermococcus litoralis and Thermococcus hydrothermalis pullulanases or a T. hydrothermalis/T. litoralis hybrid enzyme with truncation site X4 disclosed in U.S. 61/289,040 published as WO2011/087836 (which is hereby incorporated by reference).

[0517] In another embodiment, the pullulanase is one comprising an X46 domain disclosed in WO2011/076123 (Novozymes).

[0518] The pullulanase may be added in an effective amount which include the preferred amount of about 0.0001-10 mg enzyme protein per gram DS, preferably 0.0001-0.10 mg enzyme protein per gram DS, more preferably 0.0001-0.010 mg enzyme protein per gram DS. Pullulanase activity may be determined as NPUN. An Assay for determination of NPUN is described in WO2018/098381.

[0519] Suitable commercially available pullulanase products include PROMOZYME D, PROMOZYME™ D2 (Novozymes A/S, Denmark), OPTIMAX L-300 (DuPont-Danisco, USA), and AMANO 8 (Amano, Japan).

[0520] In one embodiment, the pullulanase is derived from the Bacillus subtilis pullulanase of SEQ ID NO: 114. In one embodiment, the pullulanase is derived from the Bacillus licheniformis pullulanase of SEQ ID NO: 115. In one embodiment, the pullulanase is derived from the Oryza sativa pullulanase of SEQ ID NO: 116. In one embodiment, the pullulanase is derived from the Triticum aestivum pullulanase of SEQ ID NO: 117. In one embodiment, the pullulanase is derived from the Clostridium phytofermentans pullulanase of SEQ ID NO: 118. In one embodiment, the pullulanase is derived from the Streptomyces avermitilis pullulanase of SEQ ID NO: 119. In one embodiment, the pullulanase is derived from the Klebsiella pneumoniae pullulanase of SEQ ID NO: 120.

[0521] Additional pullulanases contemplated for use with the present invention can be found in WO2011/153516 (the content of which is incorporated herein).

[0522] Additional polynucleotides encoding suitable pullulanases may be obtained from microorganisms of any genus, including those readily available within the UniProtKB database.

[0523] The pullulanase coding sequences can also be used to design nucleic acid probes to identify and clone DNA encoding pullulanases from strains of different genera or species, as described supra.

[0524] The polynucleotides encoding pullulanases may also be identified and obtained from other sources including microorganisms isolated from nature (e.g., soil, composts, water, etc.) or DNA samples obtained directly from natural materials (e.g., soil, composts, water, etc.) as described supra.

[0525] Techniques used to isolate or clone polynucleotides encoding pullulanases are described supra.

[0526] In one embodiment, the pullulanase has a mature polypeptide sequence that comprises or consists of the amino acid sequence of any one of the pullulanases described or referenced herein (e.g., any one of SEQ ID NOs: 114-120). In another embodiment, the pullulanase has a mature polypeptide sequence that is a fragment of the any one of the pullulanases described or referenced herein (e.g., any one of SEQ ID NOs: 114-120). In one embodiment, the number of amino acid residues in the fragment is at least 75%, e.g., at least 80%, 85%, 90%, or 95% of the number of amino acid residues in referenced full length pullulanase. In other embodiments, the pullulanase may comprise the catalytic domain of any pullulanase described or referenced herein (e.g., any one of SEQ ID NOs: 114-120).

[0527] The pullulanase may be a variant of any one of the pullulanases described supra (e.g., any one of SEQ ID NOs: 114-120). In one embodiment, the pullulanase has a mature polypeptide sequence of at least 60%, e.g., at least 65%, 70%, 75%, 80%, 85%, 90%, 95%, 97%, 98%, 99%, or 100% sequence identity to any one of the pullulanases described supra (e.g., any one of SEQ ID NOs: 114-120).

[0528] Examples of suitable amino acid changes, such as conservative substitutions that do not significantly affect the folding and/or activity of the pullulanase, are described herein.

[0529] In one embodiment, the pullulanase has a mature polypeptide sequence that differs by no more than ten amino acids, e.g., by no more than five amino acids, by no more than four amino acids, by no more than three amino acids, by no more than two amino acids, or by one amino acid from the amino acid sequence of any one of the pullulanases described supra (e.g., any one of SEQ ID NOs: 114-120). In one embodiment, the pullulanase has an amino acid substitution, deletion, and/or insertion of one or more (e.g., two, several) of amino acid sequence of any one of the pullulanases described supra (e.g., any one of SEQ ID NOs: 114-120). In some embodiments, the total number of amino acid substitutions, deletions and/or insertions is not more than 10, e.g., not more than 9, 8, 7, 6, 5, 4, 3, 2, or 1.

[0530] In some embodiments, the pullulanase has at least 20%, e.g., at least 40%, at least 50%, at least 60%, at least 70%, at least 80%, at least 90%, at least 95%, at least 96%, at least 97%, at least 98%, at least 99%, or 100% of the pullulanase activity of any pullulanase described or referenced herein under the same conditions (e.g., any one of SEQ ID NOs: 114-120).

[0531] In one embodiment, the pullulanase coding sequence hybridizes under at least low stringency conditions, e.g., medium stringency conditions, medium-high stringency conditions, high stringency conditions, or very high stringency conditions with the full-length complementary strand of the coding sequence from any pullulanase described or referenced herein (e.g., any one of SEQ ID NOs: 114-120). In one embodiment, the pullulanase coding sequence has at least 65%, e.g., at least 70%, at least 75%, at least 80%, at least 85%, at least 85%, at least 90%, at least 91%, at least 92%, at least 93%, at least 94%, at least 95%, at least 96%, at least 97%, at least 98%, at least 99%, or 100% sequence identity with the coding sequence from any pullulanase described or referenced herein (e.g., any one of SEQ ID NOs: 114-120).

[0532] In one embodiment, the pullulanase comprises the coding sequence of any pullulanase described or referenced herein (e.g., any one of SEQ ID NOs: 114-120). In one embodiment, the pullulanase comprises a coding sequence that is a subsequence of the coding sequence from any pullulanase described or referenced herein, wherein the subsequence encodes a polypeptide having pullulanase activity. In one embodiment, the number of nucleotides residues in the subsequence is at least 75%, e.g., at least 80%, 85%, 90%, or 95% of the number of the referenced coding sequence.

[0533] The referenced pullulanase coding sequence of any related aspect or embodiment described herein can be the native coding sequence or a degenerate sequence, such as a codon-optimized coding sequence designed for use in a particular host cell (e.g., optimized for expression in Saccharomyces cerevisiae).

[0534] The pullulanase can also include fused polypeptides or cleavable fusion polypeptides, as described supra.

[0535] Gene Disruptions

[0536] The host cells and fermenting organisms described herein may also comprise one or more (e.g., two, several) gene disruptions, e.g., to divert sugar metabolism from undesired products to ethanol. In some embodiments, the recombinant host cells produce a greater amount of ethanol compared to the cell without the one or more disruptions when cultivated under identical conditions. In some embodiments, one or more of the disrupted endogenous genes is inactivated. In some embodiments, the host cell or fermenting organism is a diploid and has a disruption (e.g., inactivation) of both copies of the referenced gene.

[0537] In certain embodiments, the host cell or fermenting organism provided herein comprises a disruption of one or more endogenous genes encoding enzymes involved in producing alternate fermentative products such as glycerol or other byproducts such as acetate or diols. For example, the cells provided herein may comprise a disruption of one or more endogenous genes encoding a glycerol 3-phosphatase (GPP, E.C. 3.1.3.21, catalyzes conversion of glycerol-3 phosphate to glycerol), a glycerol 3-phosphate dehydrogenase (GPD, catalyzes reaction of dihydroxyacetone phosphate to glycerol 3-phosphate), glycerol kinase (catalyzes conversion of glycerol 3-phosphate to glycerol), dihydroxyacetone kinase (catalyzes conversion of dihydroxyacetone phosphate to dihydroxyacetone), glycerol dehydrogenase (catalyzes conversion of dihydroxyacetone to glycerol), and aldehyde dehydrogenase (ALD, e.g., converts acetaldehyde to acetate).

[0538] In some embodiments, the host cell or fermenting organism comprises a disruption to one or more endogenous genes encoding a glycerol 3-phosphatase (GPP). Saccharomyces cerevisiae has two glycerol-3-phosphate phosphatase paralogs encoding GPP1 (UniProt No. P41277; SEQ ID NO: 257) and GPP2 (UniProt No. P40106; SEQ ID NO: 258) (Pahlman et al. (2001) J. Biol. Chem. 276(5):3555-63; Norbeck et al. (1996) J. Biol. Chem. 271(23):13875-81). In some embodiments, the host cell or fermenting organism comprises a disruption to GPP1. In some embodiments, the host cell or fermenting organism comprises a disruption to GPP2. In some embodiments, the host cell or fermenting organism comprises a disruption to GPP1 and GPP2.

[0539] In some embodiments, the host cell or fermenting organism comprises a disruption to one or more endogenous genes encoding a glycerol 3-phosphate dehydrogenase (GPD). Saccharomyces cerevisiae has two glycerol 3-phosphate dehydrogenases which encode GPD1 (UniProt No. Q00055; SEQ ID NO: 259) and GPD2 (UniProt No. P41911; SEQ ID NO: 260). In some embodiments, the host cell or fermenting organism comprises a disruption to GPD1. In some embodiments, the host cell or fermenting organism comprises a disruption to GPD2. In some embodiments, the host cell or fermenting organism comprises a disruption to GPD1 and GPD2.

[0540] In some embodiments, the host cell or fermenting organism comprises a disruption to an endogenous gene encoding GPP (e.g., GPP1 and/or GPP2) and/or a GPD (GPD1 and/or GPD2), wherein the host cell or fermenting organism produces a decreased amount of glycerol (e.g., at least 25% less, at least 50% less, at least 60% less, at least 70% less, at least 80% less, or at least 90% less) compared to the cell without the disruption to the endogenous gene encoding the GPP and/or GPD when cultivated under identical conditions.

[0541] Modeling analysis can be used to design gene disruptions that additionally optimize utilization of the pathway. One exemplary computational method for identifying and designing metabolic alterations favoring biosynthesis of a desired product is the OptKnock computational framework, Burgard et al., 2003, Biotechnol. Bioeng. 84: 647-657.

[0542] The host cells and fermenting organisms comprising a gene disruption may be constructed using methods well known in the art, including those methods described herein. A portion of the gene can be disrupted such as the coding region or a control sequence required for expression of the coding region. Such a control sequence of the gene may be a promoter sequence or a functional part thereof, i.e., a part that is sufficient for affecting expression of the gene. For example, a promoter sequence may be inactivated resulting in no expression or a weaker promoter may be substituted for the native promoter sequence to reduce expression of the coding sequence. Other control sequences for possible modification include, but are not limited to, a leader, propeptide sequence, signal sequence, transcription terminator, and transcriptional activator.

[0543] The host cells and fermenting organisms comprising a gene disruption may be constructed by gene deletion techniques to eliminate or reduce expression of the gene. Gene deletion techniques enable the partial or complete removal of the gene thereby eliminating their expression. In such methods, deletion of the gene is accomplished by homologous recombination using a plasmid that has been constructed to contiguously contain the 5′ and 3′ regions flanking the gene.

[0544] The host cells and fermenting organisms comprising a gene disruption may also be constructed by introducing, substituting, and/or removing one or more (e.g., two, several) nucleotides in the gene or a control sequence thereof required for the transcription or translation thereof. For example, nucleotides may be inserted or removed for the introduction of a stop codon, the removal of the start codon, or a frame-shift of the open reading frame. Such a modification may be accomplished by site-directed mutagenesis or PCR generated mutagenesis in accordance with methods known in the art. See, for example, Botstein and Shortle, 1985, Science 229: 4719; Lo et al., 1985, Proc. Natl. Acad. Sci. U.S.A. 81: 2285; Higuchi et al., 1988, Nucleic Acids Res 16: 7351; Shimada, 1996, Meth. Mol. Biol. 57: 157; Ho et al., 1989, Gene 77: 61; Horton et al., 1989, Gene 77: 61; and Sarkar and Sommer, 1990, Bio Techniques 8: 404.

[0545] The host cells and fermenting organisms comprising a gene disruption may also be constructed by inserting into the gene a disruptive nucleic acid construct comprising a nucleic acid fragment homologous to the gene that will create a duplication of the region of homology and incorporate construct DNA between the duplicated regions. Such a gene disruption can eliminate gene expression if the inserted construct separates the promoter of the gene from the coding region or interrupts the coding sequence such that a non-functional gene product results. A disrupting construct may be simply a selectable marker gene accompanied by 5′ and 3′ regions homologous to the gene. The selectable marker enables identification of transformants containing the disrupted gene.

[0546] The host cells and fermenting organisms comprising a gene disruption may also be constructed by the process of gene conversion (see, for example, Iglesias and Trautner, 1983, Molecular General Genetics 189: 73-76). For example, in the gene conversion method, a nucleotide sequence corresponding to the gene is mutagenized in vitro to produce a defective nucleotide sequence, which is then transformed into the recombinant strain to produce a defective gene. By homologous recombination, the defective nucleotide sequence replaces the endogenous gene. It may be desirable that the defective nucleotide sequence also comprises a marker for selection of transformants containing the defective gene.

[0547] The host cells and fermenting organisms comprising a gene disruption may be further constructed by random or specific mutagenesis using methods well known in the art, including, but not limited to, chemical mutagenesis (see, for example, Hopwood, The Isolation of Mutants in Methods in Microbiology (J. R. Norris and D. W. Ribbons, eds.) pp. 363-433, Academic Press, New York, 1970). Modification of the gene may be performed by subjecting the parent strain to mutagenesis and screening for mutant strains in which expression of the gene has been reduced or inactivated. The mutagenesis, which may be specific or random, may be performed, for example, by use of a suitable physical or chemical mutagenizing agent, use of a suitable oligonucleotide, or subjecting the DNA sequence to PCR generated mutagenesis. Furthermore, the mutagenesis may be performed by use of any combination of these mutagenizing methods.

[0548] Examples of a physical or chemical mutagenizing agent suitable for the present purpose include ultraviolet (UV) irradiation, hydroxylamine, N-methyl-N′-nitro-N-nitrosoguanidine (MNNG), N-methyl-N′-nitrosogaunidine (NTG) O-methyl hydroxylamine, nitrous acid, ethyl methane sulphonate (EMS), sodium bisulphite, formic acid, and nucleotide analogues. When such agents are used, the mutagenesis is typically performed by incubating the parent strain to be mutagenized in the presence of the mutagenizing agent of choice under suitable conditions, and selecting for mutants exhibiting reduced or no expression of the gene.

[0549] A nucleotide sequence homologous or complementary to a gene described herein may be used from other microbial sources to disrupt the corresponding gene in a recombinant strain of choice.

[0550] In one embodiment, the modification of a gene in the recombinant cell is unmarked with a selectable marker. Removal of the selectable marker gene may be accomplished by culturing the mutants on a counter-selection medium. Where the selectable marker gene contains repeats flanking its 5′ and 3′ ends, the repeats will facilitate the looping out of the selectable marker gene by homologous recombination when the mutant strain is submitted to counter-selection. The selectable marker gene may also be removed by homologous recombination by introducing into the mutant strain a nucleic acid fragment comprising 5′ and 3′ regions of the defective gene, but lacking the selectable marker gene, followed by selecting on the counter-selection medium. By homologous recombination, the defective gene containing the selectable marker gene is replaced with the nucleic acid fragment lacking the selectable marker gene. Other methods known in the art may also be used.

[0551] Methods Using a Starch-Containing Material

[0552] In some embodiments, the methods described herein produce a fermentation product from a starch-containing material. Starch-containing material is well-known in the art, containing two types of homopolysaccharides (amylose and amylopectin) and is linked by alpha-(1-4)-D-glycosidic bonds. Any suitable starch-containing starting material may be used. The starting material is generally selected based on the desired fermentation product, such as ethanol. Examples of starch-containing starting materials include cereal, tubers or grains. Specifically, the starch-containing material may be corn, wheat, barley, rye, milo, sago, cassava, tapioca, sorghum, oat, rice, peas, beans, or sweet potatoes, or mixtures thereof. Contemplated are also waxy and non-waxy types of corn and barley.

[0553] In one embodiment, the starch-containing starting material is corn. In one embodiment, the starch-containing starting material is wheat. In one embodiment, the starch-containing starting material is barley. In one embodiment, the starch-containing starting material is rye. In one embodiment, the starch-containing starting material is milo. In one embodiment, the starch-containing starting material is sago. In one embodiment, the starch-containing starting material is cassava. In one embodiment, the starch-containing starting material is tapioca. In one embodiment, the starch-containing starting material is sorghum. In one embodiment, the starch-containing starting material is rice. In one embodiment, the starch-containing starting material is peas. In one embodiment, the starch-containing starting material is beans. In one embodiment, the starch-containing starting material is sweet potatoes. In one embodiment, the starch-containing starting material is oats.

[0554] The methods using a starch-containing material may include a conventional process (e.g., including a liquefaction step described in more detail below) or a raw starch hydrolysis process. In some embodiments using a starch-containing material, saccharification of the starch-containing material is at a temperature above the initial gelatinization temperature. In some embodiments using a starch-containing material, saccharification of the starch-containing material is at a temperature below the initial gelatinization temperature.

[0555] Liquefaction

[0556] In embodiments using a starch-containing material, the methods may further comprise a liquefaction step carried out by subjecting the starch-containing material at a temperature above the initial gelatinization temperature to an alpha-amylase and optionally a protease and/or a glucoamylase. Other enzymes such as a pullulanase and phytase may also be present and/or added in liquefaction. In some embodiments, the liquefaction step is carried out prior to steps a) and b) of the described methods.

[0557] Liquefaction step may be carried out for 0.5-5 hours, such as 1-3 hours, such as typically about 2 hours.

[0558] The term “initial gelatinization temperature” means the lowest temperature at which gelatinization of the starch-containing material commences. In general, starch heated in water begins to gelatinize between about 50° C. and 75° C.; the exact temperature of gelatinization depends on the specific starch and can readily be determined by the skilled artisan. Thus, the initial gelatinization temperature may vary according to the plant species, to the particular variety of the plant species as well as with the growth conditions. The initial gelatinization temperature of a given starch-containing material may be determined as the temperature at which birefringence is lost in 5% of the starch granules using the method described by Gorinstein and Lii, 1992, Starch/Stärke 44(12): 461-466.

[0559] Liquefaction is typically carried out at a temperature in the range from 70-100° C. In one embodiment, the temperature in liquefaction is between 75-95° C., such as between 75-90° C., between 80-90° C., or between 82-88° C., such as about 85° C.

[0560] A jet-cooking step may be carried out prior to liquefaction in step, for example, at a temperature between 110-145° C., 120-140° C., 125-135° C., or about 130° C. for about 1-15 minutes, for about 3-10 minutes, or about 5 minutes.

[0561] The pH during liquefaction may be between 4 and 7, such as pH 4.5-6.5, pH 5.0-6.5, pH 5.0-6.0, pH 5.2-6.2, or about 5.2, about 5.4, about 5.6, or about 5.8.

[0562] In one embodiment, the process further comprises, prior to liquefaction, the steps of:

[0563] i) reducing the particle size of the starch-containing material, preferably by dry milling;

[0564] ii) forming a slurry comprising the starch-containing material and water.

[0565] The starch-containing starting material, such as whole grains, may be reduced in particle size, e.g., by milling, in order to open up the structure, to increase surface area, and allowing for further processing. Generally, there are two types of processes: wet and dry milling. In dry milling whole kernels are milled and used. Wet milling gives a good separation of germ and meal (starch granules and protein). Wet milling is often applied at locations where the starch hydrolysate is used in production of, e.g., syrups. Both dry milling and wet milling are well known in the art of starch processing. In one embodiment the starch-containing material is subjected to dry milling. In one embodiment, the particle size is reduced to between 0.05 to 3.0 mm, e.g., 0.1-0.5 mm, or so that at least 30%, at least 50%, at least 70%, or at least 90% of the starch-containing material fit through a sieve with a 0.05 to 3.0 mm screen, e.g., 0.1-0.5 mm screen. In another embodiment, at least 50%, e.g., at least 70%, at least 80%, or at least 90% of the starch-containing material fit through a sieve with #6 screen.

[0566] The aqueous slurry may contain from 10-55 w/w-% dry solids (DS), e.g., 25-45 w/w-% dry solids (DS), or 30-40 w/w-% dry solids (DS) of starch-containing material.

[0567] The alpha-amylase, optionally a protease, and optionally a glucoamylase may initially be added to the aqueous slurry to initiate liquefaction (thinning). In one embodiment, only a portion of the enzymes (e.g., about ⅓) is added to the aqueous slurry, while the rest of the enzymes (e.g., about ⅔) are added during liquefaction step.

[0568] A non-exhaustive list of alpha-amylases used in liquefaction can be found in the “Alpha-Amylases” section. Examples of suitable proteases used in liquefaction include any protease described supra in the “Proteases” section. Examples of suitable glucoamylases used in liquefaction include any glucoamylase found in the “Glucoamylases” section.

[0569] Saccharification and Fermentation of Starch-Containing Material

[0570] In embodiments using a starch-containing material, a glucoamylase may be present and/or added in saccharification step a) and/or fermentation step b) or simultaneous saccharification and fermentation (SSF). The glucoamylase of the saccharification step a) and/or fermentation step b) or simultaneous saccharification and fermentation (SSF) is typically different from the glucoamylase optionally added to any liquefaction step described supra. In one embodiment, the glucoamylase is present and/or added together with a fungal alpha-amylase.

[0571] In some embodiments, the host cell or fermenting organism comprises a heterologous polynucleotide encoding a glucoamylase, for example, as described in WO2017/087330, the content of which is hereby incorporated by reference.

[0572] Examples of glucoamylases can be found in the “Glucoamylases” section.

[0573] When doing sequential saccharification and fermentation, saccharification step a) may be carried out under conditions well-known in the art. For instance, saccharification step a) may last up to from about 24 to about 72 hours. In one embodiment, pre-saccharification is done. Pre-saccharification is typically done for 40-90 minutes at a temperature between 30-65° C., typically about 60° C. Pre-saccharification is, in one embodiment, followed by saccharification during fermentation in simultaneous saccharification and fermentation (SSF). Saccharification is typically carried out at temperatures from 20-75° C., preferably from 40-70° C., typically about 60° C., and typically at a pH between 4 and 5, such as about pH 4.5.

[0574] Fermentation is carried out in a fermentation medium, as known in the art and, e.g., as described herein. The fermentation medium includes the fermentation substrate, that is, the carbohydrate source that is metabolized by the fermenting organism. With the processes described herein, the fermentation medium may comprise nutrients and growth stimulator(s) for the fermenting organism(s). Nutrient and growth stimulators are widely used in the art of fermentation and include nitrogen sources, such as ammonia; urea, vitamins and minerals, or combinations thereof.

[0575] Generally, fermenting organisms such as yeast, including Saccharomyces cerevisiae yeast, require an adequate source of nitrogen for propagation and fermentation. Many sources of supplemental nitrogen, if necessary, can be used and such sources of nitrogen are well known in the art. The nitrogen source may be organic, such as urea, DDGs, wet cake or corn mash, or inorganic, such as ammonia or ammonium hydroxide. In one embodiment, the nitrogen source is urea.

[0576] Fermentation can be carried out under low nitrogen conditions, e.g., when using a protease-expressing yeast. In some embodiments, the fermentation step is conducted with less than 1000 ppm supplemental nitrogen (e.g., urea or ammonium hydroxide), such as less than 750 ppm, less than 500 ppm, less than 400 ppm, less than 300 ppm, less than 250 ppm, less than 200 ppm, less than 150 ppm, less than 100 ppm, less than 75 ppm, less than 50 ppm, less than 25 ppm, or less than 10 ppm, supplemental nitrogen. In some embodiments, the fermentation step is conducted with no supplemental nitrogen.

[0577] Simultaneous saccharification and fermentation (“SSF”) is widely used in industrial scale fermentation product production processes, especially ethanol production processes. When doing SSF the saccharification step a) and the fermentation step b) are carried out simultaneously. There is no holding stage for the saccharification, meaning that a fermenting organism, such as yeast, and enzyme(s), may be added together. However, it is also contemplated to add the fermenting organism and enzyme(s) separately. SSF is typically carried out at a temperature from 25° C. to 40° C., such as from 28° C. to 35° C., such as from 30° C. to 34° C., or about 32° C. In one embodiment, fermentation is ongoing for 6 to 120 hours, in particular 24 to 96 hours. In one embodiment, the pH is between 4-5.

[0578] In one embodiment, a cellulolytic enzyme composition is present and/or added in saccharification, fermentation or simultaneous saccharification and fermentation (SSF). Examples of such cellulolytic enzyme compositions can be found in the “Cellulolytic Enzymes and Compositions” section. The cellulolytic enzyme composition may be present and/or added together with a glucoamylase, such as one disclosed in the “Glucoamylases” section.

[0579] Methods Using a Cellulosic-Containing Material

[0580] In some embodiments, the methods described herein produce a fermentation product from a cellulosic-containing material. The predominant polysaccharide in the primary cell wall of biomass is cellulose, the second most abundant is hemicellulose, and the third is pectin. The secondary cell wall, produced after the cell has stopped growing, also contains polysaccharides and is strengthened by polymeric lignin covalently cross-linked to hemicellulose. Cellulose is a homopolymer of anhydrocellobiose and thus a linear beta-(1-4)-D-glucan, while hemicelluloses include a variety of compounds, such as xylans, xyloglucans, arabinoxylans, and mannans in complex branched structures with a spectrum of substituents. Although generally polymorphous, cellulose is found in plant tissue primarily as an insoluble crystalline matrix of parallel glucan chains. Hemicelluloses usually hydrogen bond to cellulose, as well as to other hemicelluloses, which help stabilize the cell wall matrix.

[0581] Cellulose is generally found, for example, in the stems, leaves, hulls, husks, and cobs of plants or leaves, branches, and wood of trees. The cellulosic-containing material can be, but is not limited to, agricultural residue, herbaceous material (including energy crops), municipal solid waste, pulp and paper mill residue, waste paper, and wood (including forestry residue) (see, for example, Wiselogel et al., 1995, in Handbook on Bioethanol (Charles E. Wyman, editor), pp. 105-118, Taylor & Francis, Washington D.C.; Wyman, 1994, Bioresource Technology 50: 3-16; Lynd, 1990, Applied Biochemistry and Biotechnology 24/25: 695-719; Mosier et al., 1999, Recent Progress in Bioconversion of Lignocellulosics, in Advances in Biochemical Engineering/Biotechnology, T. Scheper, managing editor, Volume 65, pp. 23-40, Springer-Verlag, New York). It is understood herein that the cellulose may be in the form of lignocellulose, a plant cell wall material containing lignin, cellulose, and hemicellulose in a mixed matrix. In one embodiment, the cellulosic-containing material is any biomass material. In another embodiment, the cellulosic-containing material is lignocellulose, which comprises cellulose, hemicelluloses, and lignin.

[0582] In one embodiment, the cellulosic-containing material is agricultural residue, herbaceous material (including energy crops), municipal solid waste, pulp and paper mill residue, waste paper, or wood (including forestry residue).

[0583] In another embodiment, the cellulosic-containing material is arundo, bagasse, bamboo, corn cob, corn fiber, corn stover, miscanthus, rice straw, switchgrass, or wheat straw.

[0584] In another embodiment, the cellulosic-containing material is aspen, eucalyptus, fir, pine, poplar, spruce, or willow.

[0585] In another embodiment, the cellulosic-containing material is algal cellulose, bacterial cellulose, cotton linter, filter paper, microcrystalline cellulose (e.g., AVICEL®), or phosphoric-acid treated cellulose.

[0586] In another embodiment, the cellulosic-containing material is an aquatic biomass. As used herein the term “aquatic biomass” means biomass produced in an aquatic environment by a photosynthesis process. The aquatic biomass can be algae, emergent plants, floating-leaf plants, or submerged plants.

[0587] The cellulosic-containing material may be used as is or may be subjected to pretreatment, using conventional methods known in the art, as described herein. In a preferred embodiment, the cellulosic-containing material is pretreated.

[0588] The methods of using cellulosic-containing material can be accomplished using methods conventional in the art. Moreover, the methods of can be implemented using any conventional biomass processing apparatus configured to carry out the processes.

[0589] Cellulosic Pretreatment

[0590] In one embodiment the cellulosic-containing material is pretreated before saccharification.

[0591] In practicing the processes described herein, any pretreatment process known in the art can be used to disrupt plant cell wall components of the cellulosic-containing material (Chandra et al., 2007, Adv. Biochem. Engin./Biotechnol. 108: 67-93; Galbe and Zacchi, 2007, Adv. Biochem. Engin./Biotechnol. 108: 41-65; Hendriks and Zeeman, 2009, Bioresource Technology 100: 10-18; Mosier et al., 2005, Bioresource Technology 96: 673-686; Taherzadeh and Karimi, 2008, Int. J. Mol. Sci. 9: 1621-1651; Yang and Wyman, 2008, Biofuels Bioproducts and Biorefining-Biofpr. 2: 26-40).

[0592] The cellulosic-containing material can also be subjected to particle size reduction, sieving, pre-soaking, wetting, washing, and/or conditioning prior to pretreatment using methods known in the art.

[0593] Conventional pretreatments include, but are not limited to, steam pretreatment (with or without explosion), dilute acid pretreatment, hot water pretreatment, alkaline pretreatment, lime pretreatment, wet oxidation, wet explosion, ammonia fiber explosion, organosolv pretreatment, and biological pretreatment. Additional pretreatments include ammonia percolation, ultrasound, electroporation, microwave, supercritical CO₂, supercritical H₂O, ozone, ionic liquid, and gamma irradiation pretreatments.

[0594] In a one embodiment, the cellulosic-containing material is pretreated before saccharification (i.e., hydrolysis) and/or fermentation. Pretreatment is preferably performed prior to the hydrolysis. Alternatively, the pretreatment can be carried out simultaneously with enzyme hydrolysis to release fermentable sugars, such as glucose, xylose, and/or cellobiose. In most cases the pretreatment step itself results in some conversion of biomass to fermentable sugars (even in absence of enzymes).

[0595] In one embodiment, the cellulosic-containing material is pretreated with steam. In steam pretreatment, the cellulosic-containing material is heated to disrupt the plant cell wall components, including lignin, hemicellulose, and cellulose to make the cellulose and other fractions, e.g., hemicellulose, accessible to enzymes. The cellulosic-containing material is passed to or through a reaction vessel where steam is injected to increase the temperature to the required temperature and pressure and is retained therein for the desired reaction time. Steam pretreatment is preferably performed at 140-250° C., e.g., 160-200° C. or 170-190° C., where the optimal temperature range depends on optional addition of a chemical catalyst. Residence time for the steam pretreatment is preferably 1-60 minutes, e.g., 1-30 minutes, 1-20 minutes, 3-12 minutes, or 4-10 minutes, where the optimal residence time depends on the temperature and optional addition of a chemical catalyst. Steam pretreatment allows for relatively high solids loadings, so that the cellulosic-containing material is generally only moist during the pretreatment. The steam pretreatment is often combined with an explosive discharge of the material after the pretreatment, which is known as steam explosion, that is, rapid flashing to atmospheric pressure and turbulent flow of the material to increase the accessible surface area by fragmentation (Duff and Murray, 1996, Bioresource Technology 855: 1-33; Galbe and Zacchi, 2002, Appl. Microbiol. Biotechnol. 59: 618-628; U.S. Patent Application No. 2002/0164730). During steam pretreatment, hemicellulose acetyl groups are cleaved and the resulting acid autocatalyzes partial hydrolysis of the hemicellulose to monosaccharides and oligosaccharides. Lignin is removed to only a limited extent.

[0596] In one embodiment, the cellulosic-containing material is subjected to a chemical pretreatment. The term “chemical treatment” refers to any chemical pretreatment that promotes the separation and/or release of cellulose, hemicellulose, and/or lignin. Such a pretreatment can convert crystalline cellulose to amorphous cellulose. Examples of suitable chemical pretreatment processes include, for example, dilute acid pretreatment, lime pretreatment, wet oxidation, ammonia fiber/freeze expansion (AFEX), ammonia percolation (APR), ionic liquid, and organosolv pretreatments.

[0597] A chemical catalyst such as H₂SO₄ or SO₂ (typically 0.3 to 5% w/w) is sometimes added prior to steam pretreatment, which decreases the time and temperature, increases the recovery, and improves enzymatic hydrolysis (Ballesteros et al., 2006, Appl. Biochem. Biotechnol. 129-132: 496-508; Varga et al., 2004, Appl. Biochem. Biotechnol. 113-116: 509-523; Sassner et al., 2006, Enzyme Microb. Technol. 39: 756-762). In dilute acid pretreatment, the cellulosic-containing material is mixed with dilute acid, typically H₂SO₄, and water to form a slurry, heated by steam to the desired temperature, and after a residence time flashed to atmospheric pressure. The dilute acid pretreatment can be performed with a number of reactor designs, e.g., plug-flow reactors, counter-current reactors, or continuous counter-current shrinking bed reactors (Duff and Murray, 1996, Bioresource Technology 855: 1-33; Schell et al., 2004, Bioresource Technology 91: 179-188; Lee et al., 1999, Adv. Biochem. Eng. Biotechnol. 65: 93-115). In a specific embodiment the dilute acid pretreatment of cellulosic-containing material is carried out using 4% w/w sulfuric acid at 180° C. for 5 minutes.

[0598] Several methods of pretreatment under alkaline conditions can also be used. These alkaline pretreatments include, but are not limited to, sodium hydroxide, lime, wet oxidation, ammonia percolation (APR), and ammonia fiber/freeze expansion (AFEX) pretreatment. Lime pretreatment is performed with calcium oxide or calcium hydroxide at temperatures of 85-150° C. and residence times from 1 hour to several days (Wyman et al., 2005, Bioresource Technology 96: 1959-1966; Mosier et al., 2005, Bioresource Technology 96: 673-686). WO2006/110891, WO2006/110899, WO2006/110900, and WO2006/110901 disclose pretreatment methods using ammonia.

[0599] Wet oxidation is a thermal pretreatment performed typically at 180-200° C. for 5-15 minutes with addition of an oxidative agent such as hydrogen peroxide or over-pressure of oxygen (Schmidt and Thomsen, 1998, Bioresource Technology 64: 139-151; Palonen et al., 2004, Appl. Biochem. Biotechnol. 117: 1-17; Varga et al., 2004, Biotechnol. Bioeng. 88: 567-574; Martin et al., 2006, J. Chem. Technol. Biotechnol. 81: 1669-1677). The pretreatment is performed preferably at 1-40% dry matter, e.g., 2-30% dry matter or 5-20% dry matter, and often the initial pH is increased by the addition of alkali such as sodium carbonate.

[0600] A modification of the wet oxidation pretreatment method, known as wet explosion (combination of wet oxidation and steam explosion) can handle dry matter up to 30%. In wet explosion, the oxidizing agent is introduced during pretreatment after a certain residence time. The pretreatment is then ended by flashing to atmospheric pressure (WO2006/032282).

[0601] Ammonia fiber expansion (AFEX) involves treating the cellulosic-containing material with liquid or gaseous ammonia at moderate temperatures such as 90-150° C. and high pressure such as 17-20 bar for 5-10 minutes, where the dry matter content can be as high as 60% (Gollapalli et al., 2002, Appl. Biochem. Biotechnol. 98: 23-35; Chundawat et al., 2007, Biotechnol. Bioeng. 96: 219-231; Alizadeh et al., 2005, Appl. Biochem. Biotechnol. 121: 1133-1141; Teymouri et al., 2005, Bioresource Technology 96: 2014-2018). During AFEX pretreatment cellulose and hemicelluloses remain relatively intact. Lignin-carbohydrate complexes are cleaved.

[0602] Organosolv pretreatment delignifies the cellulosic-containing material by extraction using aqueous ethanol (40-60% ethanol) at 160-200° C. for 30-60 minutes (Pan et al., 2005, Biotechnol. Bioeng. 90: 473-481; Pan et al., 2006, Biotechnol. Bioeng. 94: 851-861; Kurabi et al., 2005, Appl. Biochem. Biotechnol. 121: 219-230). Sulphuric acid is usually added as a catalyst. In organosolv pretreatment, the majority of hemicellulose and lignin is removed.

[0603] Other examples of suitable pretreatment methods are described by Schell et al., 2003, Appl. Biochem. Biotechnol. 105-108: 69-85, and Mosier et al., 2005, Bioresource Technology 96: 673-686, and US2002/0164730.

[0604] In one embodiment, the chemical pretreatment is carried out as a dilute acid treatment, and more preferably as a continuous dilute acid treatment. The acid is typically sulfuric acid, but other acids can also be used, such as acetic acid, citric acid, nitric acid, phosphoric acid, tartaric acid, succinic acid, hydrogen chloride, or mixtures thereof. Mild acid treatment is conducted in the pH range of preferably 1-5, e.g., 1-4 or 1-2.5. In one embodiment, the acid concentration is in the range from preferably 0.01 to 10 wt. % acid, e.g., 0.05 to 5 wt. % acid or 0.1 to 2 wt. % acid. The acid is contacted with the cellulosic-containing material and held at a temperature in the range of preferably 140-200° C., e.g., 165-190° C., for periods ranging from 1 to 60 minutes.

[0605] In another embodiment, pretreatment takes place in an aqueous slurry. In preferred embodiments, the cellulosic-containing material is present during pretreatment in amounts preferably between 10-80 wt. %, e.g., 20-70 wt. % or 30-60 wt. %, such as around 40 wt. %. The pretreated cellulosic-containing material can be unwashed or washed using any method known in the art, e.g., washed with water.

[0606] In one embodiment, the cellulosic-containing material is subjected to mechanical or physical pretreatment. The term “mechanical pretreatment” or “physical pretreatment” refers to any pretreatment that promotes size reduction of particles. For example, such pretreatment can involve various types of grinding or milling (e.g., dry milling, wet milling, or vibratory ball milling).

[0607] The cellulosic-containing material can be pretreated both physically (mechanically) and chemically. Mechanical or physical pretreatment can be coupled with steaming/steam explosion, hydrothermolysis, dilute or mild acid treatment, high temperature, high pressure treatment, irradiation (e.g., microwave irradiation), or combinations thereof. In one embodiment, high pressure means pressure in the range of preferably about 100 to about 400 psi, e.g., about 150 to about 250 psi. In another embodiment, high temperature means temperature in the range of about 100 to about 300° C., e.g., about 140 to about 200° C. In a preferred embodiment, mechanical or physical pretreatment is performed in a batch-process using a steam gun hydrolyzer system that uses high pressure and high temperature as defined above, e.g., a Sunds Hydrolyzer available from Sunds Defibrator AB, Sweden. The physical and chemical pretreatments can be carried out sequentially or simultaneously, as desired.

[0608] Accordingly, in one embodiment, the cellulosic-containing material is subjected to physical (mechanical) or chemical pretreatment, or any combination thereof, to promote the separation and/or release of cellulose, hemicellulose, and/or lignin.

[0609] In one embodiment, the cellulosic-containing material is subjected to a biological pretreatment. The term “biological pretreatment” refers to any biological pretreatment that promotes the separation and/or release of cellulose, hemicellulose, and/or lignin from the cellulosic-containing material. Biological pretreatment techniques can involve applying lignin-solubilizing microorganisms and/or enzymes (see, for example, Hsu, T.-A., 1996, Pretreatment of biomass, in Handbook on Bioethanol: Production and Utilization, Wyman, C. E., ed., Taylor & Francis, Washington, D.C., 179-212; Ghosh and Singh, 1993, Adv. Appl. Microbiol. 39: 295-333; McMillan, J. D., 1994, Pretreating lignocellulosic biomass: a review, in Enzymatic Conversion of Biomass for Fuels Production, Himmel, M. E., Baker, J. O., and Overend, R. P., eds., ACS Symposium Series 566, American Chemical Society, Washington, D.C., chapter 15; Gong, C. S., Cao, N. J., Du, J., and Tsao, G. T., 1999, Ethanol production from renewable resources, in Advances in Biochemical Engineering/Biotechnology, Scheper, T., ed., Springer-Verlag Berlin Heidelberg, Germany, 65: 207-241; Olsson and Hahn-Hagerdal, 1996, Enz. Microb. Tech. 18: 312-331; and Vallander and Eriksson, 1990, Adv. Biochem. Eng./Biotechnol. 42: 63-95).

[0610] Saccharification and Fermentation of Cellulosic-Containing Material

[0611] Saccharification (i.e., hydrolysis) and fermentation, separate or simultaneous, include, but are not limited to, separate hydrolysis and fermentation (SHF); simultaneous saccharification and fermentation (SSF); simultaneous saccharification and co-fermentation (SSCF); hybrid hydrolysis and fermentation (HHF); separate hydrolysis and co-fermentation (SHCF); hybrid hydrolysis and co-fermentation (HHCF).

[0612] SHF uses separate process steps to first enzymatically hydrolyze the cellulosic-containing material to fermentable sugars, e.g., glucose, cellobiose, and pentose monomers, and then ferment the fermentable sugars to ethanol. In SSF, the enzymatic hydrolysis of the cellulosic-containing material and the fermentation of sugars to ethanol are combined in one step (Philippidis, G. P., 1996, Cellulose bioconversion technology, in Handbook on Bioethanol: Production and Utilization, Wyman, C. E., ed., Taylor & Francis, Washington, D.C., 179-212). SSCF involves the co-fermentation of multiple sugars (Sheehan and Himmel, 1999, Biotechnol. Prog. 15: 817-827). HHF involves a separate hydrolysis step, and in addition a simultaneous saccharification and hydrolysis step, which can be carried out in the same reactor. The steps in an HHF process can be carried out at different temperatures, i.e., high temperature enzymatic saccharification followed by SSF at a lower temperature that the fermentation organismcan tolerate. It is understood herein that any method known in the art comprising pretreatment, enzymatic hydrolysis (saccharification), fermentation, or a combination thereof, can be used in the practicing the processes described herein.

[0613] A conventional apparatus can include a fed-batch stirred reactor, a batch stirred reactor, a continuous flow stirred reactor with ultrafiltration, and/or a continuous plug-flow column reactor (de Castilhos Corazza et al., 2003, Acta Scientiarum. Technology 25: 33-38; Gusakov and Sinitsyn, 1985, Enz. Microb. Technol. 7: 346-352), an attrition reactor (Ryu and Lee, 1983, Biotechnol. Bioeng. 25: 53-65). Additional reactor types include fluidized bed, upflow blanket, immobilized, and extruder type reactors for hydrolysis and/or fermentation.

[0614] In the saccharification step (i.e., hydrolysis step), the cellulosic and/or starch-containing material, e.g., pretreated, is hydrolyzed to break down cellulose, hemicellulose, and/or starch to fermentable sugars, such as glucose, cellobiose, xylose, xylulose, arabinose, mannose, galactose, and/or soluble oligosaccharides. The hydrolysis is performed enzymatically e.g., by a cellulolytic enzyme composition. The enzymes of the compositions can be added simultaneously or sequentially.

[0615] Enzymatic hydrolysis may be carried out in a suitable aqueous environment under conditions that can be readily determined by one skilled in the art. In one embodiment, hydrolysis is performed under conditions suitable for the activity of the enzymes(s), i.e., optimal for the enzyme(s). The hydrolysis can be carried out as a fed batch or continuous process where the cellulosic and/or starch-containing material is fed gradually to, for example, an enzyme containing hydrolysis solution.

[0616] The saccharification is generally performed in stirred-tank reactors or fermentors under controlled pH, temperature, and mixing conditions. Suitable process time, temperature and pH conditions can readily be determined by one skilled in the art. For example, the saccharification can last up to 200 hours, but is typically performed for preferably about 12 to about 120 hours, e.g., about 16 to about 72 hours or about 24 to about 48 hours. The temperature is in the range of preferably about 25° C. to about 70° C., e.g., about 30° C. to about 65° C., about 40° C. to about 60° C., or about 50° C. to about 55° C. The pH is in the range of preferably about 3 to about 8, e.g., about 3.5 to about 7, about 4 to about 6, or about 4.5 to about 5.5. The dry solids content is in the range of preferably about 5 to about 50 wt. %, e.g., about 10 to about 40 wt. % or about 20 to about 30 wt. %.

[0617] Saccharification in may be carried out using a cellulolytic enzyme composition. Such enzyme compositions are described below in the “Cellulolytic Enzyme Composition’-section below. The cellulolytic enzyme compositions can comprise any protein useful in degrading the cellulosic-containing material. In one embodiment, the cellulolytic enzyme composition comprises or further comprises one or more (e.g., several) proteins selected from the group consisting of a cellulase, an AA9 (GH61) polypeptide, a hemicellulase, an esterase, an expansin, a ligninolytic enzyme, an oxidoreductase, a pectinase, a protease, and a swollenin.

[0618] In another embodiment, the cellulase is preferably one or more (e.g., several) enzymes selected from the group consisting of an endoglucanase, a cellobiohydrolase, and a beta-glucosidase.

[0619] In another embodiment, the hemicellulase is preferably one or more (e.g., several) enzymes selected from the group consisting of an acetylmannan esterase, an acetylxylan esterase, an arabinanase, an arabinofuranosidase, a coumaric acid esterase, a feruloyl esterase, a galactosidase, a glucuronidase, a glucuronoyl esterase, a mannanase, a mannosidase, a xylanase, and a xylosidase. In another embodiment, the oxidoreductase is one or more (e.g., several) enzymes selected from the group consisting of a catalase, a laccase, and a peroxidase.

[0620] The enzymes or enzyme compositions used in a processes of the present invention may be in any form suitable for use, such as, for example, a fermentation broth formulation or a cell composition, a cell lysate with or without cellular debris, a semi-purified or purified enzyme preparation, or a host cell as a source of the enzymes. The enzyme composition may be a dry powder or granulate, a non-dusting granulate, a liquid, a stabilized liquid, or a stabilized protected enzyme. Liquid enzyme preparations may, for instance, be stabilized by adding stabilizers such as a sugar, a sugar alcohol or another polyol, and/or lactic acid or another organic acid according to established processes.

[0621] In one embodiment, an effective amount of cellulolytic or hemicellulolytic enzyme composition to the cellulosic-containing material is about 0.5 to about 50 mg, e.g., about 0.5 to about 40 mg, about 0.5 to about 25 mg, about 0.75 to about 20 mg, about 0.75 to about 15 mg, about 0.5 to about 10 mg, or about 2.5 to about 10 mg per g of the cellulosic-containing material.

[0622] In one embodiment, such a compound is added at a molar ratio of the compound to glucosyl units of cellulose of about 10⁻⁶ to about 10, e.g., about 10⁻⁶ to about 7.5, about 10⁻⁶ to about 5, about 10⁻⁶ to about 2.5, about 10⁻⁶ to about 1, about 10⁻⁵ to about 1, about 10⁻⁵ to about 10⁻¹, about 10⁻⁴ to about 10⁻¹, about 10⁻³ to about 10⁻¹, or about 10⁻³ to about 10⁻². In another embodiment, an effective amount of such a compound is about 0.1 μM to about 1 M, e.g., about 0.5 μM to about 0.75 M, about 0.75 μM to about 0.5 M, about 1 μM to about 0.25 M, about 1 μM to about 0.1 M, about 5 μM to about 50 mM, about 10 μM to about 25 mM, about 50 μM to about 25 mM, about 10 μM to about 10 mM, about 5 μM to about 5 mM, or about 0.1 mM to about 1 mM.

[0623] The term “liquor” means the solution phase, either aqueous, organic, or a combination thereof, arising from treatment of a lignocellulose and/or hemicellulose material in a slurry, or monosaccharides thereof, e.g., xylose, arabinose, mannose, etc. under conditions as described in WO2012/021401, and the soluble contents thereof. A liquor for cellulolytic enhancement of an AA9 polypeptide (GH61 polypeptide) can be produced by treating a lignocellulose or hemicellulose material (or feedstock) by applying heat and/or pressure, optionally in the presence of a catalyst, e.g., acid, optionally in the presence of an organic solvent, and optionally in combination with physical disruption of the material, and then separating the solution from the residual solids. Such conditions determine the degree of cellulolytic enhancement obtainable through the combination of liquor and an AA9 polypeptide during hydrolysis of a cellulosic substrate by a cellulolytic enzyme preparation. The liquor can be separated from the treated material using a method standard in the art, such as filtration, sedimentation, or centrifugation.

[0624] In one embodiment, an effective amount of the liquor to cellulose is about 10⁻⁶ to about 10 g per g of cellulose, e.g., about 10⁻⁶ to about 7.5 g, about 10⁻⁶ to about 5 g, about 10⁻⁶ to about 2.5 g, about 10⁻⁶ to about 1 g, about 10⁻⁵ to about 1 g, about 10⁻⁵ to about 10⁻¹ g, about 10⁻⁴ to about 10⁻¹ g, about 10⁻³ to about 10⁻¹ g, or about 10⁻³ to about 10⁻² g per g of cellulose.

[0625] In the fermentation step, sugars, released from the cellulosic-containing material, e.g., as a result of the pretreatment and enzymatic hydrolysis steps, are fermented to ethanol, by a host cell or fermenting organism, such as yeast described herein. Hydrolysis (saccharification) and fermentation can be separate or simultaneous.

[0626] Any suitable hydrolyzed cellulosic-containing material can be used in the fermentation step in practicing the processes described herein. Such feedstocks include, but are not limited to carbohydrates (e.g., lignocellulose, xylans, cellulose, starch, etc.). The material is generally selected based on economics, i.e., costs per equivalent sugar potential, and recalcitrance to enzymatic conversion.

[0627] Production of ethanol by a host cell or fermenting organism using cellulosic-containing material results from the metabolism of sugars (monosaccharides). The sugar composition of the hydrolyzed cellulosic-containing material and the ability of the host cell or fermenting organism to utilize the different sugars has a direct impact in process yields. Prior to Applicant's disclosure herein, strains known in the art utilize glucose efficiently but do not (or very limitedly) metabolize pentoses like xylose, a monosaccharide commonly found in hydrolyzed material.

[0628] Compositions of the fermentation media and fermentation conditions depend on the host cell or fermenting organism and can easily be determined by one skilled in the art. Typically, the fermentation takes place under conditions known to be suitable for generating the fermentation product. In some embodiments, the fermentation process is carried out under aerobic or microaerophilic (i.e., where the concentration of oxygen is less than that in air), or anaerobic conditions. In some embodiments, fermentation is conducted under anaerobic conditions (i.e., no detectable oxygen), or less than about 5, about 2.5, or about 1 mmol/L/h oxygen. In the absence of oxygen, the NADH produced in glycolysis cannot be oxidized by oxidative phosphorylation. Under anaerobic conditions, pyruvate or a derivative thereof may be utilized by the host cell as an electron and hydrogen acceptor in order to generate NAD+.

[0629] The fermentation process is typically run at a temperature that is optimal for the recombinant fungal cell. For example, in some embodiments, the fermentation process is performed at a temperature in the range of from about 25° C. to about 42° C. Typically the process is carried out a temperature that is less than about 38° C., less than about 35° C., less than about 33° C., or less than about 38° C., but at least about 20° C., 22° C., or 25° C.

[0630] A fermentation stimulator can be used in a process described herein to further improve the fermentation, and in particular, the performance of the host cell or fermenting organism, such as, rate enhancement and product yield (e.g., ethanol yield). A “fermentation stimulator” refers to stimulators for growth of the host cells and fermenting organisms, in particular, yeast. Preferred fermentation stimulators for growth include vitamins and minerals. Examples of vitamins include multivitamins, biotin, pantothenate, nicotinic acid, meso-inositol, thiamine, pyridoxine, para-aminobenzoic acid, folic acid, riboflavin, and Vitamins A, B, C, D, and E. See, for example, Alfenore et al., Improving ethanol production and viability of Saccharomyces cerevisiae by a vitamin feeding strategy during fed-batch process, Springer-Verlag (2002), which is hereby incorporated by reference. Examples of minerals include minerals and mineral salts that can supply nutrients comprising P, K, Mg, S, Ca, Fe, Zn, Mn, and Cu.

[0631] Cellulolytic Enzymes and Compositions

[0632] A cellulolytic enzyme or cellulolytic enzyme composition may be present and/or added during saccharification. A cellulolytic enzyme composition is an enzyme preparation containing one or more (e.g., several) enzymes that hydrolyze cellulosic-containing material. Such enzymes include endoglucanase, cellobiohydrolase, beta-glucosidase, and/or combinations thereof.

[0633] In some embodiments, the host cell or fermenting organism comprises one or more (e.g., several) heterologous polynucleotides encoding enzymes that hydrolyze cellulosic-containing material (e.g., an endoglucanase, cellobiohydrolase, beta-glucosidase or combinations thereof). Any enzyme described or referenced herein that hydrolyzes cellulosic-containing material is contemplated for expression in the host cell or fermenting organism.

[0634] The cellulolytic enzyme may be any cellulolytic enzyme that is suitable for the host cells and/or the methods described herein (e.g., an endoglucanase, cellobiohydrolase, beta-glucosidase), such as a naturally occurring cellulolytic enzyme or a variant thereof that retains cellulolytic enzyme activity.

[0635] In some embodiments, the host cell or fermenting organism comprising a heterologous polynucleotide encoding a cellulolytic enzyme has an increased level of cellulolytic enzyme activity (e.g., increased endoglucanase, cellobiohydrolase, and/or beta-glucosidase) compared to the host cells without the heterologous polynucleotide encoding the cellulolytic enzyme, when cultivated under the same conditions. In some embodiments, the host cell or fermenting organism has an increased level of cellulolytic enzyme activity of at least 5%, e.g., at least 10%, at least 15%, at least 20%, at least 25%, at least 50%, at least 100%, at least 150%, at least 200%, at least 300%, or at 500% compared to the host cell or fermenting organism without the heterologous polynucleotide encoding the cellulolytic enzyme, when cultivated under the same conditions.

[0636] Exemplary cellulolytic enzymes that can be used with the host cells and/or the methods described herein include bacterial, yeast, or filamentous fungal cellulolytic enzymes, e.g., obtained from any of the microorganisms described or referenced herein, as described supra under the sections related to proteases.

[0637] The cellulolytic enzyme may be of any origin. In an embodiment the cellulolytic enzyme is derived from a strain of Trichoderma, such as a strain of Trichoderma reesei; a strain of Humicola, such as a strain of Humicola insolens, and/or a strain of Chrysosporium, such as a strain of Chrysosporium lucknowense. In a preferred embodiment the cellulolytic enzyme is derived from a strain of Trichoderma reesei.

[0638] The cellulolytic enzyme composition may further comprise one or more of the following polypeptides, such as enzymes: AA9 polypeptide (GH61 polypeptide) having cellulolytic enhancing activity, beta-glucosidase, xylanase, beta-xylosidase, CBH I, CBH II, or a mixture of two, three, four, five or six thereof.

[0639] The further polypeptide(s) (e.g., AA9 polypeptide) and/or enzyme(s) (e.g., beta-glucosidase, xylanase, beta-xylosidase, CBH I and/or CBH II may be foreign to the cellulolytic enzyme composition producing organism (e.g., Trichoderma reesei).

[0640] In an embodiment the cellulolytic enzyme composition comprises an AA9 polypeptide having cellulolytic enhancing activity and a beta-glucosidase.

[0641] In another embodiment the cellulolytic enzyme composition comprises an AA9 polypeptide having cellulolytic enhancing activity, a beta-glucosidase, and a CBH I.

[0642] In another embodiment the cellulolytic enzyme composition comprises an AA9 polypeptide having cellulolytic enhancing activity, a beta-glucosidase, a CBH I and a CBH II. Other enzymes, such as endoglucanases, may also be comprised in the cellulolytic enzyme composition.

[0643] As mentioned above the cellulolytic enzyme composition may comprise a number of difference polypeptides, including enzymes.

[0644] In one embodiment, the cellulolytic enzyme composition is a Trichoderma reesei cellulolytic enzyme composition, further comprising Thermoascus aurantiacus AA9 (GH61A) polypeptide having cellulolytic enhancing activity (e.g., WO2005/074656), and Aspergillus oryzae beta-glucosidase fusion protein (e.g., one disclosed in WO2008/057637, in particular shown as SEQ ID NOs: 59 and 60).

[0645] In another embodiment the cellulolytic enzyme composition is a Trichoderma reesei cellulolytic enzyme composition, further comprising Thermoascus aurantiacus AA9 (GH61A) polypeptide having cellulolytic enhancing activity (e.g., SEQ ID NO: 2 in WO2005/074656), and Aspergillus fumigatus beta-glucosidase (e.g., SEQ ID NO: 2 of WO2005/047499).

[0646] In another embodiment the cellulolytic enzyme composition is a Trichoderma reesei cellulolytic enzyme composition, further comprising Penicillium emersonii AA9 (GH61A) polypeptide having cellulolytic enhancing activity, in particular the one disclosed in WO2011/041397, and Aspergillus fumigatus beta-glucosidase (e.g., SEQ ID NO: 2 of WO2005/047499).

[0647] In another embodiment the cellulolytic enzyme composition is a Trichoderma reesei cellulolytic enzyme composition, further comprising Penicillium emersonii AA9 (GH61A) polypeptide having cellulolytic enhancing activity, in particular the one disclosed in WO2011/041397, and Aspergillus fumigatus beta-glucosidase (e.g., SEQ ID NO: 2 of WO2005/047499) or a variant disclosed in WO2012/044915 (hereby incorporated by reference), in particular one comprising one or more such as all of the following substitutions: F100D, S283G, N456E, F512Y.

[0648] In an embodiment the cellulolytic enzyme composition is a Trichoderma reesei cellulolytic composition, further comprising an AA9 (GH61A) polypeptide having cellulolytic enhancing activity, in particular the one derived from a strain of Penicillium emersonii (e.g., SEQ ID NO: 2 in WO2011/041397), Aspergillus fumigatus beta-glucosidase (e.g., SEQ ID NO: 2 in WO2005/047499) variant with one or more, in particular all of the following substitutions: F100D, S283G, N456E, F512Y and disclosed in WO2012/044915; Aspergillus fumigatus Cel7A CBH1, e.g., the one disclosed as SEQ ID NO: 6 in WO2011/057140 and Aspergillus fumigatus CBH II, e.g., the one disclosed as SEQ ID NO: 18 in WO2011/057140.

[0649] In a preferred embodiment the cellulolytic enzyme composition is a Trichoderma reesei, cellulolytic enzyme composition, further comprising a hemicellulase or hemicellulolytic enzyme composition, such as an Aspergillus fumigatus xylanase and Aspergillus fumigatus beta-xylosidase.

[0650] In an embodiment the cellulolytic enzyme composition also comprises a xylanase (e.g., derived from a strain of the genus Aspergillus, in particular Aspergillus aculeatus or Aspergillus fumigatus; or a strain of the genus Talaromyces, in particular Talaromyces leycettanus) and/or a beta-xylosidase (e.g., derived from Aspergillus, in particular Aspergillus fumigatus, or a strain of Talaromyces, in particular Talaromyces emersonii).

[0651] In an embodiment the cellulolytic enzyme composition is a Trichoderma reesei cellulolytic enzyme composition, further comprising Thermoascus aurantiacus AA9 (GH61A) polypeptide having cellulolytic enhancing activity (e.g., WO2005/074656), Aspergillus oryzae beta-glucosidase fusion protein (e.g., one disclosed in WO2008/057637, in particular as SEQ ID NOs: 59 and 60), and Aspergillus aculeatus xylanase (e.g., Xyl II in WO94/21785).

[0652] In another embodiment the cellulolytic enzyme composition comprises a Trichoderma reesei cellulolytic preparation, further comprising Thermoascus aurantiacus GH61A polypeptide having cellulolytic enhancing activity (e.g., SEQ ID NO: 2 in WO2005/074656), Aspergillus fumigatus beta-glucosidase (e.g., SEQ ID NO: 2 of WO2005/047499) and Aspergillus aculeatus xylanase (Xyl II disclosed in WO94/21785).

[0653] In another embodiment the cellulolytic enzyme composition comprises a Trichoderma reesei cellulolytic enzyme composition, further comprising Thermoascus aurantiacus AA9 (GH61A) polypeptide having cellulolytic enhancing activity (e.g., SEQ ID NO: 2 in WO2005/074656), Aspergillus fumigatus beta-glucosidase (e.g., SEQ ID NO: 2 of WO2005/047499) and Aspergillus aculeatus xylanase (e.g., Xyl II disclosed in WO94/21785).

[0654] In another embodiment the cellulolytic enzyme composition is a Trichoderma reesei cellulolytic enzyme composition, further comprising Penicillium emersonii AA9 (GH61A) polypeptide having cellulolytic enhancing activity, in particular the one disclosed in WO2011/041397, Aspergillus fumigatus beta-glucosidase (e.g., SEQ ID NO: 2 of WO2005/047499) and Aspergillus fumigatus xylanase (e.g., Xyl III in WO2006/078256).

[0655] In another embodiment the cellulolytic enzyme composition comprises a Trichoderma reesei cellulolytic enzyme composition, further comprising Penicillium emersonii AA9 (GH61A) polypeptide having cellulolytic enhancing activity, in particular the one disclosed in WO2011/041397, Aspergillus fumigatus beta-glucosidase (e.g., SEQ ID NO: 2 of WO2005/047499), Aspergillus fumigatus xylanase (e.g., Xyl III in WO2006/078256), and CBH I from Aspergillus fumigatus, in particular Cel7A CBH1 disclosed as SEQ ID NO: 2 in WO2011/057140.

[0656] In another embodiment the cellulolytic enzyme composition is a Trichoderma reesei cellulolytic enzyme composition, further comprising Penicillium emersonii AA9 (GH61A) polypeptide having cellulolytic enhancing activity, in particular the one disclosed in WO2011/041397, Aspergillus fumigatus beta-glucosidase (e.g., SEQ ID NO: 2 of WO2005/047499), Aspergillus fumigatus xylanase (e.g., Xyl III in WO2006/078256), CBH I from Aspergillus fumigatus, in particular Cel7A CBH1 disclosed as SEQ ID NO: 2 in WO2011/057140, and CBH II derived from Aspergillus fumigatus in particular the one disclosed as SEQ ID NO: 4 in WO2013/028928.

[0657] In another embodiment the cellulolytic enzyme composition is a Trichoderma reesei cellulolytic enzyme composition, further comprising Penicillium emersonii AA9 (GH61A) polypeptide having cellulolytic enhancing activity, in particular the one disclosed in WO2011/041397, Aspergillus fumigatus beta-glucosidase (e.g., SEQ ID NO: 2 of WO2005/047499) or variant thereof with one or more, in particular all, of the following substitutions: F100D, S283G, N456E, F512Y; Aspergillus fumigatus xylanase (e.g., Xyl III in WO2006/078256), CBH I from Aspergillus fumigatus, in particular Cel7A CBH I disclosed as SEQ ID NO: 2 in WO2011/057140, and CBH II derived from Aspergillus fumigatus, in particular the one disclosed in WO2013/028928.

[0658] In another embodiment the cellulolytic enzyme composition is a Trichoderma reesei cellulolytic enzyme composition comprising the CBH I (GENSEQP Accession No. AZY49536 (WO2012/103293); a CBH II (GENSEQP Accession No. AZY49446 (WO2012/103288); a beta-glucosidase variant (GENSEQP Accession No. AZU67153 (WO2012/44915)), in particular with one or more, in particular all, of the following substitutions: F100D, S283G, N456E, F512Y; and AA9 (GH61 polypeptide) (GENSEQP Accession No. BAL61510 (WO2013/028912)).

[0659] In another embodiment the cellulolytic enzyme composition is a Trichoderma reesei cellulolytic enzyme composition comprising a CBH I (GENSEQP Accession No. AZY49536 (WO2012/103293)); a CBH II (GENSEQP Accession No. AZY49446 (WO2012/103288); a GH10 xylanase (GENSEQP Accession No. BAK46118 (WO2013/019827)); and a beta-xylosidase (GENSEQP Accession No. AZI04896 (WO2011/057140)).

[0660] In another embodiment the cellulolytic enzyme composition is a Trichoderma reesei cellulolytic enzyme composition comprising a CBH I (GENSEQP Accession No. AZY49536 (WO2012/103293)); a CBH II (GENSEQP Accession No. AZY49446 (WO2012/103288)); and an AA9 (GH61 polypeptide; GENSEQP Accession No. BAL61510 (WO2013/028912)).

[0661] In another embodiment the cellulolytic enzyme composition is a Trichoderma reesei cellulolytic enzyme composition comprising a CBH I (GENSEQP Accession No. AZY49536 (WO2012/103293)); a CBH II (GENSEQP Accession No. AZY49446 (WO2012/103288)), an AA9 (GH61 polypeptide; GENSEQP Accession No. BAL61510 (WO2013/028912)), and a catalase (GENSEQP Accession No. BAC11005 (WO2012/130120)).

[0662] In an embodiment the cellulolytic enzyme composition is a Trichoderma reesei cellulolytic enzyme composition comprising a CBH I (GENSEQP Accession No. AZY49446 (WO2012/103288); a CBH II (GENSEQP Accession No. AZY49446 (WO2012/103288)), a beta-glucosidase variant (GENSEQP Accession No. AZU67153 (WO2012/44915)), with one or more, in particular all, of the following substitutions: F100D, S283G, N456E, F512Y; an AA9 (GH61 polypeptide; GENSEQP Accession No. BAL61510 (WO2013/028912)), a GH10 xylanase (GENSEQP Accession No. BAK46118 (WO2013/019827)), and a beta-xylosidase (GENSEQP Accession No. AZI04896 (WO2011/057140)).

[0663] In an embodiment the cellulolytic composition is a Trichoderma reesei cellulolytic enzyme preparation comprising an EG I (Swissprot Accession No. P07981), EG II (EMBL Accession No. M19373), CBH I (supra); CBH II (supra); beta-glucosidase variant (supra) with the following substitutions: F100D, S283G, N456E, F512Y; an AA9 (GH61 polypeptide; supra), GH10 xylanase (supra); and beta-xylosidase (supra).

[0664] All cellulolytic enzyme compositions disclosed in WO2013/028928 are also contemplated and hereby incorporated by reference.

[0665] The cellulolytic enzyme composition comprises or may further comprise one or more (several) proteins selected from the group consisting of a cellulase, a AA9 (i.e., GH61) polypeptide having cellulolytic enhancing activity, a hemicellulase, an expansin, an esterase, a laccase, a ligninolytic enzyme, a pectinase, a peroxidase, a protease, and a swollenin.

[0666] In one embodiment the cellulolytic enzyme composition is a commercial cellulolytic enzyme composition. Examples of commercial cellulolytic enzyme compositions suitable for use in a process of the invention include: CELLIC® CTec (Novozymes A/S), CELLIC® CTec2 (Novozymes A/S), CELLIC® CTec3 (Novozymes A/S), CELLUCLAST™ (Novozymes A/S), SPEZYME™ CP (Genencor Int.), ACCELLERASE™ 1000, ACCELLERASE 1500, ACCELLERASE™ TRIO (DuPont), FILTRASE® NL (DSM); METHAPLUS® S/L 100 (DSM), ROHAMENT™ 7069 W (Röhm GmbH), or ALTERNAFUEL® CMAX3™ (Dyadic International, Inc.). The cellulolytic enzyme composition may be added in an amount effective from about 0.001 to about 5.0 wt. % of solids, e.g., about 0.025 to about 4.0 wt. % of solids or about 0.005 to about 2.0 wt. % of solids.

[0667] Additional enzymes, and compositions thereof can be found in WO2011/153516 and WO2016/045569 (the contents of which are incorporated herein).

[0668] Additional polynucleotides encoding suitable cellulolytic enzymes may be obtained from microorganisms of any genus, including those readily available within the UniProtKB database.

[0669] The cellulolytic enzyme coding sequences can also be used to design nucleic acid probes to identify and clone DNA encoding cellulolytic enzymes from strains of different genera or species, as described supra.

[0670] The polynucleotides encoding cellulolytic enzymes may also be identified and obtained from other sources including microorganisms isolated from nature (e.g., soil, composts, water, etc.) or DNA samples obtained directly from natural materials (e.g., soil, composts, water, etc.) as described supra.

[0671] Techniques used to isolate or clone polynucleotides encoding cellulolytic enzymes are described supra.

[0672] In one embodiment, the cellulolytic enzyme has a mature polypeptide sequence of at least 60%, e.g., at least 65%, at least 70%, at least 75%, at least 80%, at least 85%, at least 90%, at least 91%, at least 92%, at least 93%, at least 94%, at least 95%, at least 96%, at least 97%, at least 98%, at least 99%, or 100% sequence identity to any cellulolytic enzyme described or referenced herein (e.g., any endoglucanase, cellobiohydrolase, or beta-glucosidase). In one embodiment, the cellulolytic enzyme ha a mature polypeptide sequence that differs by no more than ten amino acids, e.g., by no more than five amino acids, by no more than four amino acids, by no more than three amino acids, by no more than two amino acids, or by one amino acid from any cellulolytic enzyme described or referenced herein. In one embodiment, the cellulolytic enzyme has a mature polypeptide sequence that comprises or consists of the amino acid sequence of any cellulolytic enzyme described or referenced herein, allelic variant, or a fragment thereof having cellulolytic enzyme activity. In one embodiment, the cellulolytic enzyme has an amino acid substitution, deletion, and/or insertion of one or more (e.g., two, several) amino acids. In some embodiments, the total number of amino acid substitutions, deletions and/or insertions is not more than 10, e.g., not more than 9, 8, 7, 6, 5, 4, 3, 2, or 1.

[0673] In some embodiments, the cellulolytic enzyme has at least 20%, e.g., at least 40%, at least 50%, at least 60%, at least 70%, at least 80%, at least 90%, at least 95%, at least 96%, at least 97%, at least 98%, at least 99%, or 100% of the cellulolytic enzyme activity of any cellulolytic enzyme described or referenced herein (e.g., any endoglucanase, cellobiohydrolase, or beta-glucosidase) under the same conditions.

[0674] In one embodiment, the cellulolytic enzyme coding sequence hybridizes under at least low stringency conditions, e.g., medium stringency conditions, medium-high stringency conditions, high stringency conditions, or very high stringency conditions with the full-length complementary strand of the coding sequence from any cellulolytic enzyme described or referenced herein (e.g., any endoglucanase, cellobiohydrolase, or beta-glucosidase). In one embodiment, the cellulolytic enzyme coding sequence has at least 65%, e.g., at least 70%, at least 75%, at least 80%, at least 85%, at least 85%, at least 90%, at least 91%, at least 92%, at least 93%, at least 94%, at least 95%, at least 96%, at least 97%, at least 98%, at least 99%, or 100% sequence identity with the coding sequence from any cellulolytic enzyme described or referenced herein.

[0675] In one embodiment, the polynucleotide encoding the cellulolytic enzyme comprises the coding sequence of any cellulolytic enzyme described or referenced herein (e.g., any endoglucanase, cellobiohydrolase, or beta-glucosidase). In one embodiment, the polynucleotide encoding the cellulolytic enzyme comprises a subsequence of the coding sequence from any cellulolytic enzyme described or referenced herein, wherein the subsequence encodes a polypeptide having cellulolytic enzyme activity. In one embodiment, the number of nucleotides residues in the subsequence is at least 75%, e.g., at least 80%, 85%, 90%, or 95% of the number of the referenced coding sequence.

[0676] The cellulolytic enzyme can also include fused polypeptides or cleavable fusion polypeptides, as described supra.

[0677] Fermentation Products

[0678] A fermentation product can be any substance derived from the fermentation. The fermentation product can be, without limitation, an alcohol (e.g., arabinitol, n-butanol, isobutanol, ethanol, glycerol, methanol, ethylene glycol, 1,3-propanediol [propylene glycol], butanediol, glycerin, sorbitol, and xylitol); an alkane (e.g., pentane, hexane, heptane, octane, nonane, decane, undecane, and dodecane), a cycloalkane (e.g., cyclopentane, cyclohexane, cycloheptane, and cyclooctane), an alkene (e.g., pentene, hexene, heptene, and octene); an amino acid (e.g., aspartic acid, glutamic acid, glycine, lysine, serine, and threonine); a gas (e.g., methane, hydrogen (H₂), carbon dioxide (CO₂), and carbon monoxide (CO)); isoprene; a ketone (e.g., acetone); an organic acid (e.g., acetic acid, acetonic acid, adipic acid, ascorbic acid, citric acid, 2,5-diketo-D-gluconic acid, formic acid, fumaric acid, glucaric acid, gluconic acid, glucuronic acid, glutaric acid, 3-hydroxypropionic acid, itaconic acid, lactic acid, malic acid, malonic acid, oxalic acid, oxaloacetic acid, propionic acid, succinic acid, and xylonic acid); and polyketide.

[0679] In one embodiment, the fermentation product is an alcohol. The term “alcohol” encompasses a substance that contains one or more hydroxyl moieties. The alcohol can be, but is not limited to, n-butanol, isobutanol, ethanol, methanol, arabinitol, butanediol, ethylene glycol, glycerin, glycerol, 1,3-propanediol, sorbitol, xylitol. See, for example, Gong et al., 1999, Ethanol production from renewable resources, in Advances in Biochemical Engineering/Biotechnology, Scheper, T., ed., Springer-Verlag Berlin Heidelberg, Germany, 65: 207-241; Silveira and Jonas, 2002, Appl. Microbiol. Biotechnol. 59: 400-408; Nigam and Singh, 1995, Process Biochemistry 30(2): 117-124; Ezeji et al., 2003, World Journal of Microbiology and Biotechnology 19(6): 595-603. In one embodiment, the fermentation product is ethanol.

[0680] In another embodiment, the fermentation product is an alkane. The alkane may be an unbranched or a branched alkane. The alkane can be, but is not limited to, pentane, hexane, heptane, octane, nonane, decane, undecane, or dodecane.

[0681] In another embodiment, the fermentation product is a cycloalkane. The cycloalkane can be, but is not limited to, cyclopentane, cyclohexane, cycloheptane, or cyclooctane.

[0682] In another embodiment, the fermentation product is an alkene. The alkene may be an unbranched or a branched alkene. The alkene can be, but is not limited to, pentene, hexene, heptene, or octene.

[0683] In another embodiment, the fermentation product is an amino acid. The organic acid can be, but is not limited to, aspartic acid, glutamic acid, glycine, lysine, serine, or threonine. See, for example, Richard and Margaritis, 2004, Biotechnology and Bioengineering 87(4): 501-515.

[0684] In another embodiment, the fermentation product is a gas. The gas can be, but is not limited to, methane, H₂, CO₂, or CO. See, for example, Kataoka et al., 1997, Water Science and Technology 36(6-7): 41-47; and Gunaseelan, 1997, Biomass and Bioenergy 13(1-2): 83-114.

[0685] In another embodiment, the fermentation product is isoprene.

[0686] In another embodiment, the fermentation product is a ketone. The term “ketone” encompasses a substance that contains one or more ketone moieties. The ketone can be, but is not limited to, acetone.

[0687] In another embodiment, the fermentation product is an organic acid. The organic acid can be, but is not limited to, acetic acid, acetonic acid, adipic acid, ascorbic acid, citric acid, 2,5-diketo-D-gluconic acid, formic acid, fumaric acid, glucaric acid, gluconic acid, glucuronic acid, glutaric acid, 3-hydroxypropionic acid, itaconic acid, lactic acid, malic acid, malonic acid, oxalic acid, propionic acid, succinic acid, or xylonic acid. See, for example, Chen and Lee, 1997, Appl. Biochem. Biotechnol. 63-65: 435-448.

[0688] In another embodiment, the fermentation product is polyketide.

[0689] In some embodiments, the host cell or fermenting organism (or processes thereof), provide higher yield of fermentation product (e.g., ethanol) when compared to the same cell without the heterologous polynucleotide encoding a sugar transporter described herein under the same conditions (e.g., after 40 hours of fermentation). In some embodiments, the process results in at least 0.25%, such as 0.5%, 0.75%, 1.0%, 1.25%, 1.5%, 1.75%, 2%, 3% or 5% higher yield of the fermentation product (e.g., ethanol).

[0690] Recovery

[0691] The fermentation product, e.g., ethanol, can optionally be recovered from the fermentation medium using any method known in the art including, but not limited to, chromatography, electrophoretic procedures, differential solubility, distillation, or extraction. For example, alcohol is separated from the fermented cellulosic material and purified by conventional methods of distillation. Ethanol with a purity of up to about 96 vol. % can be obtained, which can be used as, for example, fuel ethanol, drinking ethanol, i.e., potable neutral spirits, or industrial ethanol.

[0692] In some embodiments of the methods, the fermentation product after being recovered is substantially pure. With respect to the methods herein, “substantially pure” intends a recovered preparation that contains no more than 15% impurity, wherein impurity intends compounds other than the fermentation product (e.g., ethanol). In one variation, a substantially pure preparation is provided wherein the preparation contains no more than 25% impurity, or no more than 20% impurity, or no more than 10% impurity, or no more than 5% impurity, or no more than 3% impurity, or no more than 1% impurity, or no more than 0.5% impurity.

[0693] Suitable assays to test for the production of ethanol and contaminants, and sugar consumption can be performed using methods known in the art. For example, ethanol product, as well as other organic compounds, can be analyzed by methods such as HPLC (High Performance Liquid Chromatography), GC-MS (Gas Chromatography Mass Spectroscopy) and LC-MS (Liquid Chromatography-Mass Spectroscopy) or other suitable analytical methods using routine procedures well known in the art. The release of ethanol in the fermentation broth can also be tested with the culture supernatant. Byproducts and residual sugar in the fermentation medium (e.g., glucose or xylose) can be quantified by HPLC using, for example, a refractive index detector for glucose and alcohols, and a UV detector for organic acids (Lin et al., Biotechnol. Bioeng. 90:775-779 (2005)), or using other suitable assay and detection methods well known in the art.

[0694] The invention may further be described in the following numbered paragraphs:

[0695] Paragraph [1]. A recombinant host cell comprising, (1) an active pentose fermentation pathway, and (2) a heterologous polynucleotide encoding a non-phosphorylating NADP-dependent glyceraldehyde-3-phosphate dehydrogenase (GAPN).

[0696] Paragraph [2]. The recombinant host cell of paragraph [1], wherein the heterologous polynucleotide encoding a non-phosphorylating NADP-dependent glyceraldehyde phosphate dehydrogenase (GAPN) is operably linked to a promoter that is foreign to the polynucleotide.

[0697] Paragraph [3]. The recombinant host cell of paragraph [1] or [2], wherein the heterologous polynucleotide encodes a non-phosphorylating NADP-dependent glyceraldehyde-3-phosphate dehydrogenase (GAPN) has a mature polypeptide sequence with at least 60%, e.g., at least 65%, 70%, 75%, 80%, 85%, 90%, 95%, 97%, 98%, 99%, or 100% sequence identity to any one of SEQ ID NOs: 262-280 or 289-300, and wherein the cell comprises an active arabinose fermentation pathway.

[0698] Paragraph [4]. The recombinant host cell of any one of paragraphs [1]-[3], wherein the heterologous polynucleotide encodes a non-phosphorylating NADP-dependent glyceraldehyde-3-phosphate dehydrogenase (GAPN) having a mature polypeptide sequence that differs by no more than ten amino acids, e.g., by no more than five amino acids, by no more than four amino acids, by no more than three amino acids, by no more than two amino acids, or by one amino acid from any one of SEQ ID NOs: 262-280 or 289-300.

[0699] Paragraph [5]. The recombinant host cell of any one of paragraphs [1]-[4], wherein the heterologous polynucleotide encodes a non-phosphorylating NADP-dependent glyceraldehyde-3-phosphate dehydrogenase (GAPN) has a mature polypeptide sequence comprising or consisting of the amino acid sequence of any one of SEQ ID NOs: 262-280 or 289-300.

[0700] Paragraph [6]. The recombinant host cell of paragraphs [1]-[5], wherein the cell comprises an active xylose fermentation pathway.

[0701] Paragraph [7]. The recombinant host cell of paragraph [6], wherein the cell comprises one or more active xylose fermentation pathway genes selected from:

a heterologous polynucleotide encoding a xylose isomerase (XI), and
a heterologous polynucleotide encoding a xylulokinase (XK).

[0702] Paragraph [8]. The recombinant host cell of paragraph [6] or [7], wherein the cell comprises one or more active xylose fermentation pathway genes selected from:

a heterologous polynucleotide encoding a xylose reductase (XR),
a heterologous polynucleotide encoding a xylitol dehydrogenase (XDH), and
a heterologous polynucleotide encoding a xylulokinase (XK).

[0703] Paragraph [9]. The recombinant host cell of any one of paragraphs [1]-[8], wherein the cell comprises an active arabinose fermentation pathway.

[0704] Paragraph [10]. The recombinant host cell of paragraph [9], wherein the cell comprises one or more active arabinose fermentation pathway genes selected from:

a heterologous polynucleotide encoding a L-arabinose isomerase (AI),
a heterologous polynucleotide encoding a L-ribulokinase (RK), and
a heterologous polynucleotide encoding a L-ribulose-5-P4-epimerase (R5PE).

[0705] Paragraph [11]. The recombinant host cell of paragraph [9] or [10], wherein the cell comprises one or more active arabinose fermentation pathway genes selected from:

a heterologous polynucleotide encoding an aldose reductase (AR),
a heterologous polynucleotide encoding a L-arabinitol 4-dehydrogenase (LAD),
a heterologous polynucleotide encoding a L-xylulose reductase (LXR),
a heterologous polynucleotide encoding a xylitol dehydrogenase (XDH) and
a heterologous polynucleotide encoding a xylulokinase (XK).

[0706] Paragraph [12]. The recombinant host cell of any one of paragraphs [1]-[11], the cell comprises an active xylose fermentation pathway and an active arabinose fermentation pathway.

[0707] Paragraph [13]. The recombinant host cell of any one of paragraphs [1]-[12], wherein the cell further comprises a heterologous polynucleotide encoding a glucoamylase.

[0708] Paragraph [14]. The recombinant host cell of paragraph [13], wherein the glucoamylase has a mature polypeptide sequence with at least 60%, e.g., at least 65%, 70%, 75%, 80%, 85%, 90%, 95%, 97%, 98%, 99%, or 100% sequence identity the amino acid sequence of any one of SEQ ID NOs: 8, 102-113, 229, 230 and 244-250.

[0709] Paragraph [15]. The recombinant host cell of paragraph [13] or [14], wherein the heterologous polynucleotide encoding the glucoamylase is operably linked to a promoter that is foreign to the polynucleotide.

[0710] Paragraph [16]. The recombinant host cell of any one of paragraphs [1]-[15], wherein the cell further comprises a heterologous polynucleotide encoding an alpha-amylase.

[0711] Paragraph [17]. The recombinant host cell of paragraph [16], wherein the alpha-amylase has a mature polypeptide sequence with at least 60%, e.g., at least 65%, 70%, 75%, 80%, 85%, 90%, 95%, 97%, 98%, 99%, or 100% sequence identity the amino acid sequence of any one of SEQ ID NOs: 76-101, 121-174, 231 and 251-256.

[0712] Paragraph [18]. The recombinant host cell of paragraph [16] or [17], wherein the heterologous polynucleotide encoding the alpha-amylase is operably linked to a promoter that is foreign to the polynucleotide.

[0713] Paragraph [19]. The recombinant host cell of any one of paragraphs [1]-[18], wherein the cell further comprises a heterologous polynucleotide encoding a phospholipase.

[0714] Paragraph [20]. The recombinant host cell of paragraph [19], wherein the phospholipase has a mature polypeptide sequence with at least 60%, e.g., at least 65%, 70%, 75%, 80%, 85%, 90%, 95%, 97%, 98%, 99%, or 100% sequence identity the amino acid sequence of any one of SEQ ID NOs: 235, 236, 237, 238, 239, 240, 241 and 242.

[0715] Paragraph [21]. The recombinant host cell of paragraph [19] or [20], wherein the heterologous polynucleotide encoding phospholipase is operably linked to a promoter that is foreign to the polynucleotide.

[0716] Paragraph [22]. The recombinant host cell of any one of paragraphs [1]-[21], wherein the cell further comprises a heterologous polynucleotide encoding a trehalase.

[0717] Paragraph [23]. The recombinant host cell of paragraph [22], wherein the trehalase has a mature polypeptide sequence with at least 60%, e.g., at least 65%, 70%, 75%, 80%, 85%, 90%, 95%, 97%, 98%, 99%, or 100% sequence identity the amino acid sequence of any one of SEQ ID NOs: 175-226.

[0718] Paragraph [24]. The recombinant host cell of paragraph [22] or [23], wherein the heterologous polynucleotide encoding the trehalase is operably linked to a promoter that is foreign to the polynucleotide.

[0719] Paragraph [25]. The recombinant host cell of any one of paragraphs [1]-[24], wherein the cell further comprises a heterologous polynucleotide encoding a protease.

[0720] Paragraph [26]. The recombinant host cell of paragraph [25], wherein the protease has a mature polypeptide sequence with at least 60%, e.g., at least 65%, 70%, 75%, 80%, 85%, 90%, 95%, 97%, 98%, 99%, or 100% sequence identity the amino acid sequence of any one of SEQ ID NOs: 9-73.

[0721] Paragraph [27]. The recombinant host cell of paragraph [25] or [26], wherein the heterologous polynucleotide encoding the protease is operably linked to a promoter that is foreign to the polynucleotide.

[0722] Paragraph [28]. The recombinant host cell of any one of paragraphs [1]-[27], wherein the cell further comprises a heterologous polynucleotide encoding a pullulanase.

[0723] Paragraph [29]. The recombinant host cell of paragraph [28], wherein the pullulanase has a mature polypeptide sequence with at least 60%, e.g., at least 65%, 70%, 75%, 80%, 85%, 90%, 95%, 97%, 98%, 99%, or 100% sequence identity the amino acid sequence of any one of SEQ ID NOs: 114-120.

[0724] Paragraph [30]. The recombinant host cell of paragraph [28] or [29], wherein the heterologous polynucleotide encoding the pullulanase is operably linked to a promoter that is foreign to the polynucleotide.

[0725] Paragraph [31]. The recombinant host cell of any one of paragraphs [1]-[30], wherein the cell is capable of higher anaerobic growth rate on pentose (e.g., xylose and/or arabinose) compared to the same cell without the heterologous polynucleotide encoding a non-phosphorylating NADP-dependent glyceraldehyde-3-phosphate dehydrogenase (GAPN) (e.g., under conditions described in Example 2).

[0726] Paragraph [32]. The recombinant host cell of any one of paragraphs [1]-[31], wherein the cell is capable of a higher rate of pentose consumption (e.g., at least 5%, 10%, 15%, 20%, 25%, 30%, 35%, 40%, 45%, 50%, 60%, 75% or 90% higher xylose and/or arabinose consumption) compared to the same cell without the heterologous polynucleotide encoding a non-phosphorylating NADP-dependent glyceraldehyde-3-phosphate dehydrogenase (GAPN) (e.g., under conditions described in Example 2).

[0727] Paragraph [33]. The recombinant host cell of any one of paragraphs [1]-[32], wherein the cell is capable of higher pentose (e.g., xylose and/or arabinose) consumption compared to the same cell without the heterologous polynucleotide encoding a non-phosphorylating NADP-dependent glyceraldehyde-3-phosphate dehydrogenase (GAPN) at about or after 120 hours fermentation (e.g., under conditions described in Example 2).

[0728] Paragraph [34]. The recombinant host cell of paragraph [33], wherein the cell is capable of consuming more than 65%, e.g., at least 70%, 75%, 80%, 85%, 90%, 95% of pentose (e.g., xylose and/or arabinose) in the medium at about or after 120 hours fermentation (e.g., under conditions described in Example 2).

[0729] Paragraph [35]. The recombinant host cell of any one of paragraphs [1]-[34], wherein the cell is capable of higher ethanol production compared to the same cell without the heterologous polynucleotide encoding a non-phosphorylating NADP-dependent glyceraldehyde phosphate dehydrogenase (GAPN) (e.g., under conditions described in Example 2).

[0730] Paragraph [36]. The recombinant host cell of any one of paragraphs [1]-[35], wherein the cell further comprises a heterologous polynucleotide encoding a transketolase (TKL1).

[0731] Paragraph [37]. The recombinant host cell of any one of paragraphs [1]-[36], wherein the cell further comprises a heterologous polynucleotide encoding a transaldolase (TAL1).

[0732] Paragraph [38]. The recombinant host cell of any one of paragraphs [1]-[37], wherein the cell further comprises a disruption to an endogenous gene encoding a glycerol 3-phosphate dehydrogenase (GPD).

[0733] Paragraph [39]. The recombinant host cell of any one of paragraphs [1]-[38], wherein the cell further comprises a disruption to an endogenous gene encoding a glycerol 3-phosphatase (GPP).

[0734] Paragraph [40]. The recombinant host cell of paragraph [38] or [39], wherein the GPD and/or GPP gene is inactivated.

[0735] Paragraph [41]. The recombinant yeast cell of any of paragraphs [38]-[40], wherein the cell produces a decreased amount of glycerol (e.g., at least 25% less, at least 50% less, at least 60% less, at least 70% less, at least 80% less, or at least 90% less) compared to the cell without the disruption to the endogenous gene encoding the GPD and/or GPP when cultivated under identical conditions.

[0736] Paragraph [42]. The recombinant host cell of any one of paragraphs [1]-[41], wherein the cell is a yeast cell.

[0737] Paragraph [43]. The recombinant host cell of any one of paragraphs [1]-[42], wherein the cell is a Saccharomyces, Rhodotorula, Schizosaccharomyces, Kluyveromyces, Pichia, Hansenula, Rhodosporidium, Candida, Yarrowia, Lipomyces, Cryptococcus, or Dekkera sp. cell.

[0738] Paragraph [44]. The recombinant host cell of any one of paragraphs [1]-[43], wherein the cell is a Saccharomyces cerevisiae cell.

[0739] Paragraph 45. A composition comprising the recombinant host cell of any one of paragraphs [1]-[44] and one or more naturally occurring and/or non-naturally occurring components, such as components are selected from the group consisting of: surfactants, emulsifiers, gums, swelling agents, and antioxidants.

[0740] Paragraph [46]. A method of producing a derivative of a recombinant host cell of any one of paragraphs [1]-[44], the method comprising:
[0741] (a) providing:
   [0742] (i) a first host cell; and
   [0743] (ii) a second host cell, wherein the second host cell is a recombinant host cell of any one of paragraphs [1]-[44];
[0744] (b) culturing the first host cell and the second host cell under conditions which permit combining of DNA between the first and second host cells;
[0745] (c) screening or selecting for a derive host cell.

[0746] Paragraph [47]. A method of producing a fermentation product from a starch-containing or cellulosic-containing material, the method comprising:
[0747] (a) saccharifying the starch-containing or cellulosic-containing material; and
[0748] (b) fermenting the saccharified material of step (a) with the recombinant host cell of any one of paragraphs [1]-[44] under suitable conditions to produce the fermentation product.

[0749] Paragraph [48]. The method of paragraph [47], wherein saccharification of step (a) occurs on a starch-containing material, and wherein the starch-containing material is either gelatinized or ungelatinized starch.

[0750] Paragraph [49]. The method of paragraph [48], comprising liquefying the starch-containing material by contacting the material with an alpha-amylase prior to saccharification.

[0751] Paragraph [50]. The method of paragraph [48] or [49], wherein liquefying the starch-containing material and/or saccharifying the starch-containing material is conducted in presence of exogenously added protease.

[0752] Paragraph [51]. The method of any one of paragraphs [47]-[50], wherein fermentation is performed under reduced nitrogen conditions (e.g., less than 1000 ppm urea or ammonium hydroxide, such as less than 750 ppm, less than 500 ppm, less than 400 ppm, less than 300 ppm, less than 250 ppm, less than 200 ppm, less than 150 ppm, less than 100 ppm, less than 75 ppm, less than 50 ppm, less than 25 ppm, or less than 10 ppm).

[0753] Paragraph [52]. The method of any one of paragraphs [47]-[51], wherein fermentation and saccharification are performed simultaneously in a simultaneous saccharification and fermentation (SSF).

[0754] Paragraph [53]. The method of any one of paragraphs [47]-[51], wherein fermentation and saccharification are performed sequentially (SHF).

[0755] Paragraph [54]. The method of any one of paragraphs paragraph [47]-[53], comprising recovering the fermentation product from the fermentation.

[0756] Paragraph [55]. The method of paragraph [54], wherein recovering the fermentation product from the fermentation comprises distillation.

[0757] Paragraph [56]. The method of any one of paragraphs [47]-[53], wherein the fermentation product is ethanol.

[0758] Paragraph [57]. The method of any one of paragraphs [47]-[56], wherein step (a) comprises contacting the cellulosic and/or starch-containing with an enzyme composition.

[0759] Paragraph [58]. The method of any one of paragraphs [47]-[57], wherein saccharification occurs on a cellulosic material, and wherein the cellulosic material is pretreated.

[0760] Paragraph [59]. The method of paragraph [58], wherein the pretreatment is a dilute acid pretreatment.

[0761] Paragraph [60]. The method of paragraph [58] or [59], wherein saccharification occurs on a cellulosic material, and wherein step (a) comprises contacting the cellulosic enzyme composition, and wherein the enzyme composition comprises one or more enzymes selected from a cellulase, an AA9 polypeptide, a hemicellulase, a CIP, an esterase, an expansin, a ligninolytic enzyme, an oxidoreductase, a pectinase, a protease, and a swollenin.

[0762] Paragraph [61]. The method of paragraph [60], wherein the cellulase is one or more enzymes selected from an endoglucanase, a cellobiohydrolase, and a beta-glucosidase.

[0763] Paragraph [62]. The method of paragraph [60] or [61], wherein the hemicellulase is one or more enzymes selected a xylanase, an acetylxylan esterase, a feruloyl esterase, an arabinofuranosidase, a xylosidase, and a glucuronidase.

[0764] Paragraph [63]. The method of any one of paragraphs [47]-[62], wherein the method results in higher yield of fermentation product when compared to the method using the same cell without the heterologous polynucleotide encoding a non-phosphorylating NADP-dependent glyceraldehyde-3-phosphate dehydrogenase (GAPN) (e.g., under conditions described in Example 2).

[0765] Paragraph [64]. The method of paragraph [63], wherein the method results in at least 0.25% (e.g., 0.5%, 0.75%, 1.0%, 1.25%, 1.5%, 1.75%, 2%, 3% or 5%) higher yield of fermentation product.

[0766] Paragraph [65]. The method of any one of paragraphs [47]-[64], wherein fermentation is conducted under low oxygen (e.g., anaerobic) conditions.

[0767] Paragraph [66]. The method of any one of paragraphs [47]-[65] wherein a greater amount of pentose (e.g., xylose and/or arabinose) is consumed (e.g., at least 5%, 10%, 15%, 20%, 25%, 30%, 35%, 40%, 45%, 50%, 60%, 75% or 90% more) when compared to the method using the same cell without the heterologous polynucleotide encoding a non-phosphorylating NADP-dependent glyceraldehyde-3-phosphate dehydrogenase (GAPN) (e.g., under conditions described in Example 2).

[0768] Paragraph [67]. The method of any one of any one of paragraphs [47]-[66], wherein more than 65%, e.g., at least 70%, 75%, 80%, 85%, 90%, 95% of pentose (e.g., xylose and/or arabinose) in the medium is consumed (e.g., under conditions described in Example 2).

[0769] Paragraph [68]. Use of a recombinant host cell of any one of paragraphs [1]-[44] in the production of ethanol.

[0770] The invention described and claimed herein is not to be limited in scope by the specific aspects or embodiments herein disclosed, since these aspects/embodiments are intended as illustrations of several aspects of the invention. Any equivalent aspects are intended to be within the scope of this invention. Indeed, various modifications of the invention in addition to those shown and described herein will become apparent to those skilled in the art from the foregoing description. Such modifications are also intended to fall within the scope of the appended claims. In the case of conflict, the present disclosure including definitions will control. All references are specifically incorporated by reference for that which is described.

[0771] The following examples are offered to illustrate certain aspects/embodiments of the present invention, but not in any way intended to limit the scope of the invention as claimed.

### EXAMPLES

[0772] Materials and Methods

[0773] Chemicals used as buffers and substrates were commercial products of at least reagent grade.

[0774] Yeast strains S509-C04, S509-D11, S594-B06, S594-C05, and S618-E09 were prepared according the breeding procedures described in U.S. Pat. No. 8,257,959 and further comprise an active arabinose and xylose fermentation pathways with heterologous genes expressing Aldose reductase (XR), L-arabinitol 4-dehydrogenase (LAD), L-xylulose reductase (LXR), D-xylulose reductase xylitol dehydrogenase (XDH) and xylulokinase (XK).

### Example 1: Construction of Yeast Strains Expressing a Non-Phosphorylating NADP-Dependent Glyceraldehyde-3-Phosphate Dehydrogenase (GAPN)

[0775] This example describes the construction of yeast cells in two different libraries containing non-phosphorylating NADP-dependent glyceraldehyde-3-phosphate dehydrogenase (GAPN): one set under the control of an S. cerevisiae anaerobic promoter HOR7 (SEQ ID NO: 261), and the other set under a S. cerevisiae constitutive promoter TEF2 (SEQ ID NO: 2). Four pieces of DNA containing the promoter, heterologous GAPN gene split in two fragments, and terminator were designed to allow for homologous recombination between the four DNA fragments and into the XII-2 locus of the strains comprising an active pentose fermentation pathway 5509-004, 5509-D11, 5594-B06, 5594-005, and 5618-E09. The resulting strains have one promoter containing homology to the locus of interest, the heterologous GAPN gene, and TEF1 terminator (SEQ ID NO: 233) integrated into the host genome at the XII-2 locus.

[0776] Construction of the Promoter-Containing Fragments (Left Fragments)

[0777] The linear DNA containing 500 bp homology to the XII-2 site and the S. cerevisiae HOR7 promoter was PCR amplified from HP39 (plasmid containing 500 bp XII-2 site and HOR7 promoter; FIG. 4) plasmid DNA with primers 1230183 (5′-TCTTT TCGCG CCCTG GAAA-3′; SEQ ID NO: 281) and 1230203 (5′-TTTTT ATTAT TAGTC TTTTT TTTTT TTTGA CAATA TCTGT ATGAT TTG-3′; SEQ ID NO: 282). Fifty pmoles each of forward and reverse primer was used in a PCR reaction containing 10 ng of plasmid DNA as template, 10 mM dNTP mix, 5× Phusion HF Buffer (Thermo Fisher Scientific; Waltham, Mass.), and 2 units Phusion Hot Start II DNA polymerase in a final volume of 50 μL. The PCR was performed in a T100™ Thermal Cycler (Bio-Rad Laboratories, Inc.) programmed for one cycle at 98° C. for 3 minutes, followed by 32 cycles each at 98° C. for 10 seconds, 57° C. for 20 seconds, and 72° C. for 1 minute, with a final extension at 72° C. for 10 minutes. Following the thermocycler reaction, the PCR reaction products were run in a 1% TBE agarose gel at 150 volts for 60 minutes, gel isolated, and cleaned up using the NucleoSpin Gel and PCR clean-up kit (Machery-Nagel).

[0778] The linear DNA containing 500 bp homology to the XII-2 site and the S. cerevisiae TEF2 promoter was PCR amplified from HP34 (plasmid containing 500 bp XII-2 site and TEF2 promoter; FIG. 5) plasmid DNA with primers 1230183 (5′-TCTTT TCGCG CCCTG GAAA-3′; SEQ ID NO: 283) and 1230198 (5′-TTTGT TCTAG CTTAA TTATA GTTCG TTGAC CGTAT ATTC-3′; SEQ ID NO: 284). Fifty pmoles each of forward and reverse primer was used in a PCR reaction containing 10 ng of plasmid DNA as template, 10 mM dNTP mix, 5× Phusion HF Buffer (Thermo Fisher Scientific), and 2 units Phusion Hot Start II DNA polymerase in a final volume of 50 μL. The PCR was performed in a T100™ Thermal Cycler (Bio-Rad Laboratories, Inc.; Hercules, Calif.) programmed for one cycle at 98° C. for 3 minutes, followed by 32 cycles each at 98° C. for 10 seconds, 57° C. for 20 seconds, and 72° C. for 1 minute, with a final extension at 72° C. for 10 minutes. After thermocycler reaction, the PCR reaction products were run in a 1% TBE agarose gel at 150 volts for 60 minutes, gel isolated, and cleaned up using the NucleoSpin Gel and PCR clean-up kit (Machery-Nagel; Duren, Germany).

[0779] Construction of the GAPN-Containing Fragments (Middle Fragments)

[0780] Each heterologous GAPN gene contained 50 bp of promoter sequence at the 5′ end and 50 bp terminator at the 3′ end. The gene was split into two fragments with overlaps to the second fragment. Synthetic linear uncloned DNA containing 50 bp homology to the S. cerevisiae pHOR7 promoter and 400 bp of the 5′ end of GAPN was synthesized by Twist BioScience (San Francisco, Calif.). Another set of synthetic, linear uncloned DNA containing the remaining 3′ end of GAPN and 50 bp homology to tTEF1 terminator were synthesized by Twist Bioscience.

[0781] Synthetic linear uncloned DNA containing 50 bp homology to the S. cerevisiae TEF2 promoter and 400 bp of 5′ end of GAPN was synthesized by GeneArt/Thermo Fisher Scientific (Waltham, Mass.). Another set of synthetic, linear uncloned DNA containing the remaining 3′ GAPN and 50 bp homology to tTEF1 terminator were synthesized by GeneArt/Thermo Fisher Scientific.

[0782] Construction of the Terminator-Containing Fragment (Right Fragment)

[0783] The DNA containing 143 bp of the TEF1 terminator and 500 bp of the 3′ end XII-2 homology was PCR amplified from TH13 (FIG. 6; plasmid containing TEF1 terminator and 500 bp XII-2 3′ homology) plasmid DNA with primers 1230178 (5′-GGAGA TTGAT AAGAC TTTTC TAGTT GCATA TC-3′; SEQ ID NO: 285) and 1230216 (5′-TCAGT CCAAT GACAG TATTT TCTCC TTCTC AC-3′; SEQ ID NO: 286). Fifty pmoles each of forward and reverse primer was used in a PCR reaction containing 10 ng of plasmid DNA as template, 10 Mm dNTP mix, 5× Phusion HF Buffer (Thermo Fisher Scientific), and 2 units Phusion Hot Start II DNA polymerase in a final volume of 50 μL. The PCR was performed in a T100™ Thermal Cycler (Bio-Rad Laboratories, Inc.) programmed for one cycle at 98° C. for 3 minutes followed by 32 cycles each at 98° C. for 10 seconds, 59° C. for 20 seconds, and 72° C. for 30 seconds, with a final extension at 72° C. for 10 minutes. Following the thermocycler reaction, the PCR reaction products were run in a 1% TBE agarose gel at 150 volts for 60 minutes, gel isolated, and cleaned up using the NucleoSpin Gel and PCR clean-up kit (Machery-Nagel).

[0784] Integration of the Left, Middle and Right-Hand Fragments

[0785] Five yeast strains (S509-C04, S509-D11, S594-B06, S594-C05, S618-E09) were transformed with the left, two middle, and right integration fragments described above. In each transformation pool, a fixed left fragment and right fragment, with 100 ng of each fragment, was used. The two middle fragments consisted of the corresponding GAPN gene, with 100 ng of each fragment. To aid homologous recombination of the left, middle, and right fragments at the genomic XII-2 sites, a plasmid containing MAD7 and guide RNA specific to XII-2 (pMLBA638; FIG. 7) was also used in the transformation. These five components were transformed into the into five strains mentioned supra, following a yeast electroporation protocol. Transformants were selected on YPD+cloNAT to select for transformants that contain the MAD7 plasmid pMLBA638. Transformants were picked using a Q-pix Colony Picking System (Molecular Devices; San Jose, Calif.) to inoculate 1 colony/well of 96-well plate containing YPD+cloNAT media. The plates were grown for 2 days at 30° C., then glycerol was added to 20% final concentration and the plates were stored at −80° C. until needed. Integration of the heterologous GAPN construct was verified by PCR with primers targeting to the XII-2 locus 1230267 (5′-CGGCA TGCAA ACATC TACAC AATTA G-3′; SEQ ID NO: 287) and 1230272 (5′-CAGTG TTCAT GGTCT GATCG TTGTA TG-3′; SEQ ID NO: 288) and NGS sequencing of the amplicon. The resulting strains were used in the following examples as described below.

### Example 2: Evaluation of Yeast Strains Expressing a Non-Phosphorylating NADP-Dependent Glyceraldehyde-3-Phosphate Dehydrogenase (GAPN)

[0786] Yeast strains from Example 1 expressing a heterologous GAPN were evaluated for growth in media where xylose or arabinose were the sole carbon source. The Growth Profiler (Enzyscreen; Heemstede, Netherlands) was used to evaluate strain growth. The Growth Profiler is an incubator that can simultaneously control growth conditions, take images of clear-bottom multi-titer growth plates, and measure cell density over time. The software GP Viewer converts pixels of defined regions per well of each image to RBG (red, blue, green) values; green values are translated to identify growth rates for analysis.

[0787] To prepare the strains for evaluation of growth in YNB+3% arabinose or 3% xylose media, yeast strains were grown for 24 hours in YPD medium with 2% glucose, at 30° C. and 300 RPM. An inoculum of yeast was added to Growth Profiler plates containing 250 uL of medium (YNB with 3% arabinose or 3% xylose). Plates were secured in the Growth Profiler and grown at 0 RPM, 30° C. for 100 hours. The time intervals between each photo was 10 minutes. Growth evaluation was quenched by adding and mixing 50 uL of 8% H₂SO₄. Samples were centrifuged at 3000 RPM for 10 minutes and the supernatant was collected for HPLC analysis for remaining arabinose and xylose concentrations. Slope of each strain was calculated by taking the ratio of rise (green value) over run (time (hours)) during exponential phase. Strains with the highest slopes were able to grow best in the media and those with the least amount of remaining arabinose or xylose consumed the most C5 sugar. Results are shown for strains expressing GAPN compared to corresponding parent strains S509-C04, S509-D11, S594-B06 and S618-E09 in Tables 6-9, respectively.

TABLE 6
GAPN expression data for background strain S509-C04

| | | | | Xylose | | Arabinose | |
|---|---|---|---|---|---|---|---|
| Strain | Parent | | | remaining | Xylose | remaining | Arabinose |
| name | Strain | GAPN gene | Donor organism | (g/L) | slope | (g/L) | slope |
| S509-C04 | — | — | — | 20.808 | 0.700853 | 27.56 | 0.503035 |
| S723-B03 | S509-C04 | A0A1S2YP36 | Cicer arietinum | 6.48 | 1.4209 | 25.04 | 0.77366 |

TABLE 7
GAPN expression data for background strain S509-D11

| | | | | Xylose | | Arabinose | |
|---|---|---|---|---|---|---|---|
| Strain | Parent | | | remaining | Xylose | remaining | Arabinose |
| name | Strain | GAPN gene | Donor organism | (g/L) | slope | (g/L) | slope |
| S509-D11 | — | — | — | 22.95 | 0.5795 | 27.52 | 0.640129 |
| S723-B07 | S509-D11 | Q8LK61 | Triticum aestivum | 15.48 | 0.922982 | 26.48 | 0.700071 |
| S723-D04 | S509-D11 | Q9SNX8 | Apium graveolens | 11.088 | 1.097783 | 26.24 | 0.741416 |
| S723-D07 | S509-D11 | Q8LK61 | Triticum aestivum | 13.32 | 0.892573 | 26.42 | 0.721774 |
| S723-D08 | S509-D11 | A0A2C4I5G8 | Bacillus pseudomycoides | 9.144 | 1.267187 | 26.28 | 0.661879 |
| S723-E04 | S509-D11 | A0A139NKR4 | Streptococcus sp. DD12 | 7.632 | 1.282896 | 25.7 | 0.693656 |
| S723-E08 | S509-D11 | A0A0B5NZK7 | Bacillus thuringiensis | 8.568 | 1.266257 | 25.62 | 0.714428 |
| S723-F04 | S509-D11 | A0A139NKR4 | Streptococcus sp. DD12 | 6.768 | 1.226789 | 25.74 | 0.740259 |
| S723-F08 | S509-D11 | A0A0B5NZK7 | Bacillus thuringiensis | 9.36 | 1.292508 | 25.32 | 0.714145 |
| S723-G07 | S509-D11 | Q43272 | Zea mays | 18.216 | 0.920757 | 27.54 | 0.676236 |
| S723-H08 | S509-D11 | A0A0B5NZK7 | Bacillus thuringiensis | 8.784 | 1.106845 | 25.86 | 0.759321 |

TABLE 8
GAPN expression data for background strain S594-B06

| | | | | Xylose | | Arabinose | |
|---|---|---|---|---|---|---|---|
| Strain | Parent | | | remaining | Xylose | remaining | Arabinose |
| name | Strain | GAPN gene | Donor organism | (g/L) | slope | (g/L) | slope |
| S594-B06 | — | — | — | 27 | 0.159281 | 27.59333 | 0.604167 |
| S723-A02 | S594-B06 | Q8LK61 | Triticum aestivum | 14.616 | 0.999322 | 26.52 | 0.710273 |
| S723-A10 | S594-B06 | A0A2K3D5S6 | Chlamydomonas reinhardtii | 20.16 | 0.543539 | 27.84 | 0.538921 |
| S723-B01 | S594-B06 | Q9SNX8 | Apium graveolens | 16.848 | 1.066173 | 27.68 | 0.67423 |
| S723-B05 | S594-B06 | A0A2C4I5G8 | Bacillus pseudomycoides | 11.736 | 1.201598 | 26.12 | 0.775758 |
| S723-C05 | S594-B06 | A0A2C4I5G8 | Bacillus pseudomycoides | 12.024 | 1.149212 | 25.96 | 0.771674 |
| S723-C06 | S594-B06 | Q3C1A6 | Streptococcus equinus | 3.6 | 1.221188 | 25.74 | 0.744342 |
| S723-C09 | S594-B06 | A0A0B2QEZ3 | Glycine soja | 14.688 | 0.960278 | 26.52 | 0.680596 |
| S723-D01 | S594-B06 | Q9SNX8 | Apium graveolens | 9.576 | 1.370738 | 25.92 | 0.739776 |
| S723-D02 | S594-B06 | Q8LK61 | Triticum aestivum | 19.296 | 0.754572 | 27.28 | 0.652382 |
| S723-D06 | S594-B06 | Q3C1A6 | Streptococcus equinus | 9.288 | 1.218753 | 26.62 | 0.674038 |
| S723-D09 | S594-B06 | A0A0B2QEZ3 | Glycine soja | 16.416 | 0.918444 | 26.76 | 0.737828 |
| S723-D10 | S594-B06 | A0A2K3D5S6 | Chlamydomonas reinhardtii | 16.848 | 0.780714 | 26.34 | 0.65145 |
| S723-E01 | S594-B06 | A0A139NKR4 | Streptococcus sp. DD12 | 4.752 | 1.294165 | 25.92 | 0.710919 |
| S723-E05 | S594-B06 | A0A0B5NZK7 | Bacillus thuringiensis | 10.944 | 1.168923 | 26.02 | 0.73191 |
| S723-F01 | S594-B06 | A0A139NKR4 | Streptococcus sp. DD12 | 4.248 | 1.362855 | 25.52 | 0.746171 |
| S723-F05 | S594-B06 | A0A0B5NZK7 | Bacillus thuringiensis | 11.448 | 1.094423 | 26.1 | 0.654378 |
| S723-F06 | S594-B06 | Q1WIQ6 | Arabidopsis thaliana | 11.448 | 1.170741 | 26.06 | 0.693068 |
| S723-F09 | S594-B06 | EFP8C9GVR | Bacillus litoralis | 11.16 | 1.046435 | 26.08 | 0.669836 |
| S723-F10 | S594-B06 | A0A380K8A8 | Streptococcus hyointestinalis | 5.184 | 1.119477 | 25.9 | 0.684482 |
| S723-G02 | S594-B06 | Q43272 | Zea mays | 19.728 | 1.040833 | 27.56 | 0.629583 |
| S723-G09 | S594-B06 | EFP8C9GVR | Bacillus litoralis | 14.184 | 0.918927 | 26.84 | 0.667064 |
| S723-G10 | S594-B06 | A0A380K8A8 | Streptococcus hyointestinalis | 5.256 | 1.234372 | 25.88 | 0.693292 |
| S723-H02 | S594-B06 | Q43272 | Zea mays | 19.584 | 0.824895 | 27.62 | 0.561036 |
| S723-H06 | S594-B06 | Q1WIQ6 | Arabidopsis thaliana | 10.944 | 1.080716 | 26.34 | 0.708 |
| S724-A02 | S594-B06 | Q04A83 | Lactobacillus delbrueckii subsp. | 5.616 | 1.278043 | 26.54 | 0.581954 |
| | | | bulgaricus ATCC BAA-365 | | | | |
| S724-A03 | S594-B06 | A0A1S2YP36 | Cicer arietinum | 4.68 | 1.258393 | 25.94 | 0.721614 |
| S724-B01 | S594-B06 | P93338 | Nicotiana plumbaginifolia | 13.752 | 0.874882 | 24.02 | 0.730949 |
| S724-C01 | S594-B06 | P93338 | Nicotiana plumbaginifolia | 13.824 | 1.183273 | 26.8 | 0.589884 |
| S724-E03 | S594-B06 | G5JUQ8 | Streptococcus macacae | 4.68 | 1.567354 | 26.14 | 0.633984 |
| | | | NCTC 11558 | | | | |
| S724-F03 | S594-B06 | G5JUQ8 | Streptococcus macacae | 4.032 | 1.479829 | 26.1 | 0.662746 |
| | | | NCTC 11558 | | | | |
| S724-G01 | S594-B06 | Q59931 | Streptococcus mutans | 4.608 | 1.660408 | 26.3 | 0.600521 |
| S724-G02 | S594-B06 | A0A2L0D390 | Streptococcus pluranimalium | 11.016 | 1.307756 | 26.68 | 0.694448 |
| S724-H01 | S594-B06 | Q59931 | Streptococcus mutans | 5.544 | 1.55105 | 26.24 | 0.670996 |
| S724-H02 | S594-B06 | A0A2L0D390 | Streptococcus pluranimalium | 4.464 | 1.569576 | 25.8 | 0.73127 |

TABLE 9
GAPN expression data for background strain S618-E09

| | | | | Xylose | | Arabinose | |
|---|---|---|---|---|---|---|---|
| Strain | Parent | | | remaining | Xylose | remaining | Arabinose |
| name | Strain | GAPN gene | Donor organism | (g/L) | slope | (g/L) | slope |
| S618-E09 | — | — | — | 9.936 | 0.776935 | 24.52 | 0.677728 |
| S724-A04 | S618-E09 | Q9SNX8 | Apium graveolens | 3.096 | 1.237054 | 23.16 | 0.863439 |
| S724-A05 | S618-E09 | Q8LK61 | Triticum aestivum | 5.544 | 1.056129 | 23.02 | 0.833353 |
| S724-A10 | S618-E09 | A0A2L0D390 | Streptococcus pluranimalium | 1.296 | 1.308919 | 22.32 | 0.688939 |
| S724-B05 | S618-E09 | Q8LK61 | Triticum aestivum | 4.608 | 0.996398 | 22.1 | 0.799434 |
| S724-B06 | S618-E09 | A0A2C4I5G8 | Bacillus pseudomycoides | 5.112 | 1.288481 | 23.58 | 0.841435 |
| S724-B07 | S618-E09 | A0A0B2QEZ3 | Glycine soja | 4.608 | 0.969272 | 22.12 | 0.807986 |
| S724-B09 | S618-E09 | P93338 | Nicotiana plumbaginifolia | 6.264 | 1.101206 | 23.24 | 0.839846 |
| S724-C04 | S618-E09 | A0A139NKR4 | Streptococcus sp. DD12 | 1.512 | 1.532006 | 22.3 | 0.830735 |
| S724-C06 | S618-E09 | A0A0B5NZK7 | Bacillus thuringiensis | 2.808 | 1.316818 | 22.58 | 0.726427 |
| S724-C07 | S618-E09 | A0A0B2QEZ3 | Glycine soja | 5.256 | 1.136831 | 22.94 | 0.748978 |
| S724-C08 | S618-E09 | A0A2K3D5S6 | Chlamydomonas reinhardtii | 11.016 | 1.163581 | 24.76 | 0.683277 |
| S724-C09 | S618-E09 | P93338 | Nicotiana plumbaginifolia | 5.688 | 1.03658 | 22.92 | 0.761719 |
| S724-C10 | S618-E09 | A0A2L0D390 | Streptococcus pluranimalium | 1.08 | 1.33457 | 21.04 | 0.925531 |
| S724-D06 | S618-E09 | Q3C1A6 | Streptococcus equinus | 0.864 | 1.34558 | 20.6 | 0.902163 |
| S724-E04 | S618-E09 | A0A139NKR4 | Streptococcus sp. DD12 | 1.152 | 1.18621 | 22.4 | 0.718286 |
| S724-E05 | S618-E09 | Q43272 | Zea mays | 11.16 | 1.133015 | 24.8 | 0.721125 |
| S724-E06 | S618-E09 | Q3C1A6 | Streptococcus equinus | 0.936 | 1.347376 | 20.84 | 0.895341 |
| S724-E08 | S618-E09 | A0A2K3D5S6 | Chlamydomonas reinhardtii | 6.048 | 0.858946 | 22.2 | 0.901588 |
| S724-E10 | S618-E09 | A0A1S2YP36 | Cicer arietinum | 1.296 | 1.441703 | 23.04 | 0.881273 |
| S724-F04 | S618-E09 | A0A139NKR4 | Streptococcus sp. DD12 | 1.152 | 1.29305 | 21.06 | 0.922705 |
| S724-F05 | S618-E09 | Q43272 | Zea mays | 13.536 | 1.144775 | 24.88 | 0.679737 |
| S724-F08 | S618-E09 | A0A380K8A8 | Streptococcus hyointestinalis | 0.864 | 1.17823 | 21.04 | 0.925691 |
| S724-G05 | S618-E09 | A0A2C4I5G8 | Bacillus pseudomycoides | 4.32 | 1.369633 | 23.88 | 0.81838 |
| S724-G07 | S618-E09 | EFP8C9GVR | Bacillus litoralis | 10.368 | 1.20835 | 25.02 | 0.744317 |
| S724-G08 | S618-E09 | A0A380K8A8 | Streptococcus hyointestinalis | 1.008 | 1.198202 | 21.6 | 0.784932 |
| S724-G09 | S618-E09 | Q59931 | Streptococcus mutans | 2.952 | 1.740722 | 23.18 | 0.870825 |
| S724-G10 | S618-E09 | A0A1S2YP36 | Cicer arietinum | 1.152 | 1.120572 | 21.12 | 0.943312 |
| S724-H06 | S618-E09 | Q1WIQ6 | Arabidopsis thaliana | 11.016 | 1.337945 | 25.12 | 0.735549 |
| S724-H07 | S618-E09 | EFP8C9GVR | Bacillus litoralis | 3.6 | 1.050245 | 23.3 | 0.768372 |
| S724-H09 | S618-E09 | Q59931 | Streptococcus mutans UA159 | 1.584 | 1.472561 | 22.5 | 0.798632 |

[0788] A summary of calculated slope for strains expressing GAPN compared their respective parent strains is shown for arabinose and xylose media in FIGS. 8 and 9, respectively. Yeast strains expressing heterologous GAPN showed higher slope and less remaining arabinose sugar at the end of growth study in comparison to their respective parent strain background. Likewise, results from evaluation of strains in xylose show similar trends in improved performance in growth and xylose sugar consumption.

The application's sequence listing, which the Patent Office published only in electronic form, follows.

SEQUENCE LISTING (300 sequences)

SEQ ID NO: 1 - DNA, 621 bp, Saccharomyces cerevisiae
cagttcgagtttatcattatcaatactgccatttcaaagaatacgtaaataattaatagtagtgattttcctaactttatttagtcaaaaaattagccttttaattctgctgtaacccgtacatgcccaaaatagggggcgggttacacagaatatataacatcgtaggtgtctgggtgaacagtttattcctggcatccactaaatataatggagcccgctttttaagctggcatccagaaaaaaaaagaatcccagcaccaaaatattgttttcttcaccaaccatcagttcataggtccattctcttagcgcaactacagagaacaggggcacaaacaggcaaaaaacgggcacaacctcaatggagtgatgcaacctgcctggagtaaatgatgacacaaggcaattgacccacgcatgtatctatctcattttcttacaccttctattaccttctgctctctctgatttggaaaaagctgaaaaaaaaggttgaaaccagttccctgaaattattcccctacttgactaataagtatataaagacggtaggtattgattgtaattctgtaaatctatttcttaaacttcttaaattctacttttatagttagtctt

SEQ ID NO: 2 - DNA, 644 bp, Saccharomyces cerevisiae
agctacctatattccaccataatatcaatcatgcggttgctggtgtatttaccaataatgtttaatgtatatatattaggggccgtatacttacatatagtagatgtcaagcgtaggcgcttcccctgccggctgtgacggcgccataaccaaggtatctatagaccgccaatcagcaaactacctccgtacattcatgttgcacccacacatgtacacacccagaccgcaacaaattacccataaggttgtttgtgacggcgtcgtacaagagaacgtgggaactttttaggctcaccaaaaaagaaaggaaaaatacgagttgctgacagaagcctcaagaaaaaaaaaattcttcttcgactatgctggaggcagagatgatcgagccggtagttaactatatatagctaaattggttccatcaccttcttttctggtgtcgctccttctagtgctatttctggcttttcctattttttttttttccatttttctttctctctttctaatatataaattctcttgcattttctatttttctctctatctattctacttgtttattcccttcaaggtttttttttaaggagtacttgtttttagaatatacggtcaacgaactataattaagctagaacaaa

SEQ ID NO: 3 - DNA, 457 bp, Saccharomyces cerevisiae
ctccagaaaggcaacgcaaaattttttttccagggaataaactttctatgacccactacttctcgtaggaacaatttcgggcccctgcgtgttcttctgaggttcatcttttacatttgcttctgctggataattttcagaggcaacaaggaaaaattagatggcaaaaagtcgtctttcaaggaaaaatccccaccatccttcgagatcccctgtaacttattggcaactgaaagaatgaaaaggaggaaaatacaaaatatactagaactgaaaaaaaaaagtataaatagagacgatatatgccaatacttcacaatgttcgaatccattcttcatttgcagctattgtaaaataataaaacatcaagaacaaacaagctcaacttgtcttttctaagaacaaagaataaacacaaaaacaaaaagtttttttaattttaatcgctagaacaaa

SEQ ID NO: 4 - DNA, 700 bp, Saccharomyces cerevisiae
gtgagtaaggaaagagtgaggaactatcgcatacctgcatttaaagatgccgatttgggcgcgaatcctttattttggcttcaccctcatactattatcagggccagaaaaaggaagtgtttccctccttcttgaattgatgttaccctcataaagcacgtggcctcttatcgagaaagaaattaccgtcgctcgtgatttgtttgcaaaaagaacaaaactgaaaaaacccagacacgctcgacttcctgtcatcctattgattgcagcttccaatttcgtcacacaacaaggtcctagcgacggctcacaggttttgtaacaagcaatcgaaggttctggaatggcgggaaagggtttagtaccacatgctatgatgcccactgtgatctccagagcaaagttcgttcgatcgtactgttactctctctctttcaaacagaattgtccgaatcgtgtgacaacaacagcctgttctcacacactcttttcttctaaccaagggggtggtttagtttagtagaacctcgtgaaacttacatttacatatatataaacttgcataaattggtcaatgcaagaaatacatatttggtcttttctaattcgtagtttttcaagttcttagatgctttctttttctcttttttacagatcatcaaggaagtaattatctactttttacaacaaatataaaaca

SEQ ID NO: 5 - DNA, 705 bp, Sacharromyces cerevisiae
atccttttgttgtttccgggtgtacaatatggacttcctcttttctggcaaccaaacccatacatcgggattcctataataccttcgttggtctccctaacatgtaggtggcggaggggagatatacaatagaacagataccagacaagacataatgggctaaacaagactacaccaattacactgcctcattgatggtggtacataacgaactaatactgtagccctagacttgatagccatcatcatatcgaagtttcactaccctttttccatttgccatctattgaagtaataataggcgcatgcaacttcttttctttttttttcttttctctctcccccgttgttgtctcaccatatccgcaatgacaaaaaaatgatggaagacactaaaggaaaaaattaacgacaaagacagcaccaacagatgtcgttgttccagagctgatgaggggtatctcgaagcacacgaaactttttccttccttcattcacgcacactactctctaatgagcaacggtatacggccttccttccagttacttgaatttgaaataaaaaaaagtttgctgtcttgctatcaagtataaatagacctgcaattattaatcttttgtttcctcgtcattgttctcgttccctttcttccttgtttctttttctgcacaatatttcaagctataccaagcatacaatcaact

SEQ ID NO: 6 - DNA, 700 bp, Saccharomyces cerevisiae
aagaggatgtccaatattttttttaaggaataaggatacttcaagactagattcccccctgcattcccatcagaaccgtaaaccttggcgctttccttgggaagtattcaagaagtgccttgtccggtttctgtggctcacaaaccagcgcgcccgatatggctttcttttcacttatgaatgtaccagtacgggacaattagaacgctcctgtaacaatctctttgcaaatgtggggttacattctaaccatgtcacactgctgacgaaattcaaagtaaaaaaaaatgggaccacgtcttgagaacgatagattttctttattttacattgaacagtcgttgtctcagcgcgctttatgttttcattcatacttcatattataaaataacaaaagaagaatttcatattcacgcccaagaaatcaggctgctttccaaatgcaattgacacttcattagccatcacacaaaactctttcttgctggagcttcttttaaaaaagacctcagtacaccaaacacgttacccgacctcgttattttacgacaactatgataaaattctgaagaaaaaataaaaaaattttcatacttcttgcttttatttaaaccattgaatgatttcttttgaacaaaactacctgtttcaccaaaggaaatagaaagaaaaaatcaattagaagaaaacaaaaaacaaa

SEQ ID NO: 7 - protein, 19 aa, Saccharomyces cerevisiae
MRFPSIFTTVLFAASSALA

SEQ ID NO: 8 - protein, 556 aa, Gloeophyllum sepiarium
QSVDSYVSSEGPIAKAGVLANIGPNGSKASGASAGVVVASPSTSDPDYWYTWTRDSSLVFKSLIDQYTTGIDGTSSLRTLIDDFVTAEANLQQVSNPSGTLTTGGLGEPKFNVDETAFTGAWGRPQRDGPALRSTALITYGNWLLSNGNTSYVTSNLWPIIQNDLGYVVSYWNQSTYDLWEEVDSSSFFTTAVQHRALREGAAFATAIGQTSQVSSYTTQADNLLCFLQSYWNPSGGYITANTGGGRSGKDANTLLASIHTYDPSAGCDAATFQPCSDKALSNLKVYVDSFRSVYSINSGIASNAAVATGRYPEDSYQGGNPWYLTTFAVAEQLYDALNVWESQGSLEVTSTSLAFFQQFSSGVTAGTYSSSSSTYSTLTSAIKSFADGFVAVNAKYTPSNGGLAEQYSKSDGSPLSAVDLTWSYASALTAFEARNNTQFAGWGAAGLTVPSSCSGNSGGPTVAVTFNVNAETVWGENIYLTGSVDALENWSADNALLLSSANYPTWSITVNLPASTAIEYKYIRKNNGAVTWESDPNNSITTPASGSTTENDTWR

SEQ ID NO: 9 - protein, 374 aa, Aspergillus niger
APAPTRKGFTINQIARPANKTRTINLPGMYARSLAKFGGTVPQSVKEAASKGSAVTTPQNNDEEYLTPVTVGKSTLHLDFDTGSADLWVFSDELPSSEQTGHDLYTPSSSATKLSGYTWDISYGDGSSASGDVYRDTVTVGGVTTNKQAVEAASKISSEFVQNTANDGLLGLAFSSINTVQPKAQTTFFDTVKSQLDSPLFAVQLKHDAPGVYDFGYIDDSKYTGSITYTDADSSQGYWGFSTDGYSIGDGSSSSSGFSAIADTGTTLILLDDEIVSAYYEQVSGAQESEEAGGYVFSCSTNPPDFTVVIGDYKAVVPGKYINYAPISTGSSTCFGGIQSNSGLGLSILGDVFLKSQYVVFNSEGPKLGFAAQA

SEQ ID NO: 10 - protein, 590 aa, Trichoderma reesei
SVHLLESLEKLPHGWKAAETPSPSSQIVLQVALTQQNIDQLESRLAAVSTPTSSTYGKYLDVDEINSIFAPSDASSSAVESWLQSHGVTSYTKQGSSIWFQTNISTANAMLSTNFHTYSDLTGAKKVRTLKYSIPESLIGHVDLISPTTYFGTTKAMRKLKSSGVSPAADALAARQEPSSCKGTLVFEGETFNVFQPDCLRTEYSVDGYTPSVKSGSRIGFGSFLNESASFADQALFEKHFNIPSQNFSVVLINGGTDLPQPPSDANDGEANLDAQTILTIAHPLPITEFITAGSPPYFPDPVEPAGTPNENEPYLQYYEFLLSKSNAEIPQVITNSYGDEEQTVPRSYAVRVCNLIGLLGLRGISVLHSSGDEGVGASCVATNSTTPQFNPIFPATCPYVTSVGGTVSFNPEVAWAGSSGGFSYYFSRPWYQQEAVGTYLEKYVSAETKKYYGPYVDFSGRGFPDVAAHSVSPDYPVFQGGELTPSGGTSAASPVVAAIVALLNDARLREGKPTLGFLNPLIYLHASKGFTDITSGQSEGCNGNNTQTGSPLPGAGFIAGAHWNATKGWDPTTGFGVPNLKKLLALVRF

SEQ ID NO: 11 - protein, 511 aa, Thermoascus aurantiacus
VPVEVAGSAQGLDVTLSQVGNTRIKAVVKNTGSEDVTFVHLNFFKDAAPVQKVSLFRNATEVQFQGIKQRLITEGLSDDALTTLAPGATIEDEFDIASTSDLSEGGTITINSNGLVPITTDNKVTGYIPFTSNELSIDVDAAEAASVTQAVKILERRTRISSCSGSRQSALTTALRNAASLANKAADAAQSGSASKFSEYFKTTSSSTRQTVAARLRAVAREASSSSSGATTYYCLDPFGYCSGNVLAYTLPSYNIIANCPIFYTYLPPLTSTCHAQDQATTVLHEFTHAPGVYSPGTLDLAYGYQAAMGLSSSQAVMNADTYALYANAIYLGCTRISSCSGSRQSALTTALRNAASLANAAADAAQSGSASKFSEYFKTTSSSTRQTVAARLRAVAREASSSSSGATTYYCDDPYGYCSSNVLAYTLPSYNIIANCDIFYTYLPALTSTCHAQDQATTALHEFTHAPGVYSPGTDDLAYGYQAAMGLSSSQAVMNADTYALYANAIYLGC

SEQ ID NO: 12 - protein, 550 aa, Dichomitus squalens
KPTARNLKLHESRPSAPNGFSLVGSADSNRTLKLRLALAESNFSELERKLYDVSTPKSANYGKHLSKAEVQQLVAPGQDSIDAVNAWLKENDITAKTISSTGEWISFEVPVSKANDLFDADFSVFKHDDTGVEAIRTLSYSIPAELQGHLDLVHPTVTFPNPYSHLPVFQSPVKKTAEIQNFTAGAIPSSCSSTITPACLQAIYNIPTTAATESSNQLGVTGFIDQYANKKDLKTFLKKYRTDISSSTTFTLQTLDGGSNSQTGSKAGVEANLDIQYTVGVATGVPTTFISVGDDFQDGDLEGFLDVINALLDEDAPPSVLTTSYGQDESTISRALAVKLCNAYAQLGARGVSILFASGDGGVSGSQSASCSKFVPTFPSGCPYMTSVGATQGVNPETAADFSSGGFSNYWGVPDYQSDAVSTYLSALGKTNSGKYNASGRGFPDVSTQGVSFEVVVDGSVEAVDGTSCASPTFASIISLVNDKLVAAGKSPLGFLNPFLYSDGVAALNDITSGSNPGCNTNGFPAKKGWDPVTGLGTPDFKKLLTAVGL

SEQ ID NO: 13 - protein, 353 aa, Nocardiopsis prasina
ATGALPQSPTPEADAVSMQEALQRDLDLTSAEAEELLAAQDTAFEVDEAAAEAAGDAYGGSVFDTESLELTVLVTDAAAVEAVEATGAGTELVSYGIDGLDEIVQELNAADAVPGVVGWYPDVAGDTVVLEVLEGSGADVSGLLADAGVDASAVEVTTSDQPELYADIIGGLAYTMGGRCSVGFAATNAAGQPGFVTAGHCGRVGTQVTIGNGRGVFEQSVFPGNDAAFVRGTSNFTLTNLVSRYNTGGYATVAGHNQAPIGSSVCRSGSTTGWHCGTIQARGQSVSYPEGTVTNMTRTTVCAEPGDSGGSYISGTQAQGVTSGGSGNCRTGGTTFYQEVTPMVNSWGVRLRT

SEQ ID NO: 14 - protein, 456 aa, Penicillium simplicissimum
APASTAKDSVSSVVKNGVKYTVFEHAATGAKMEFVKNSGICETTPGVNQYSGYLSVGSNMNMWFWFFEARNNPQQAPLAAWFNGGPGCSSMIGLFQENGPCHFVNGDSTPSLNEYSWNNYANMLYVDQPIGVGFSYGTDDVTSTVTAAPYVWKLLQAFYAQFPEYESRDFAIFTESYGGHYGPEFASYIQEQNSAIKTGSISGENINLVALGVNNGWIDSTIQEKAYIDFSYNNSYQQLIDDSQRTSLLSAYNSQCLPAIQKCTKSGSNSDCQNADSVCYNKIEGPISSSGDWDVYDIREPSNDPYPPSTYSTYLSNADVVKAIGAQSSYQECPNGPYNKFASTGDNPRSFLSTLSSVVKSGINVLVWAGDADWICNWLGNYEVANAVDFSGHTEFSAKDLAPYTVNGTEKGMFKNVANFSFLKVYGAGHEVPYYQPDTALQVFEQVLQNKPIFST

SEQ ID NO: 15 - protein, 502 aa, Aspergillus niger
LQNPHRRAVPPPLSHRSVASRSVPVERRTTDFEYLTNKTARFLVNGTSIPEVDFDVGESYAGLLPNTPTGNSSLFFWFFPSQNPEASDEITIWLNGGPGCSSLDGLLQENGPFLWQPGTYKPVPNPYSWTNLTNVVYIDQPAGTGFSPGPSTVNNEEDVAAQFNSWFKHFVDTFDLHGRKVYITGESYAGMYVPYIADAMLNEEDTTYFNLKGIQINDPSINSDSVMMYSPAVRHLNHYNNIFQLNSTFLSYINAKADKCGYNAFLDKAITYPPPSPFPTAPEITEDCQVWDEVVMAAYDINPCFNYYHLIDFCPYLWDVLGFPSLASGPNNYFNRSDVQKILHVPPTDYSVCSETVIFANGDGSDPSSWGPLPSVIERTNNTIIGHGWLDYLLFLNGSLATIQNMTWNGKQGFQRPPVEPLFVPYHYGLAELYWGDEPDPYNLDAGAGYLGTAHTERGLTFSSVYLSGHEIPQYVPGAAYRQLEFLLGRISSLSAKGNYTS

SEQ ID NO: 16 - protein, 547 aa, Meriphilus giganteus
TPTGRNLKLHEAREDLPAGFSLRGAASPDTTLKLRIALVQNNFAELEDKLYDVSTPSSANYGNHLSKEEVEQYIAPAPESVKAVNAWLTENGLDAHTISPAGDWLAFEVPVSKANELFDADFSVFTHDESGLEAIRTLAYSIPAELQGHLDLVHPTVTFPNPNAHLPVVRSTQPIRNLTGRAIPASCASTITPACLQAIYGIPTTKATQSSNKLAVSGFIDQFANKADLKSFLAQFRKDISSSTTFSLQTLDGGENDQSPSEAGIEANLDIQYTVGLATGVPTTFISVGDDFQDGNLEGFLDIINFLLGESNPPQVLTTSYGQNENTISAKLANQLCNAYAQLGARGTSILFASGDGGVSGSQSAHCSNFVPTFPSGCPFMTSVGATQGVSPETAAAFSSGGFSNVFGIPSYQASAVSGYLSALGSTNSGKFNRSGRGFPDVSTQGVDFQIVSGGQTIGVDGTSCASPTFASVISLVNDRLIAAGKSPLGFLNPFLYSSAGKAALNDVTSGSNPGCSTNGFPAKAGWDPVTGLGTPNFAKLLTAVGL

SEQ ID NO: 17 - protein, 541 aa, Lecanicillium sp.
APAPHGPLVKFGEITKLPSKWIATGAADSDAVIKAQIGIKQNNIKGLQDKLADIADPNSPNYGQWLSKEEVDKYSAPAAADVAAVKAWLASSGITDVTMPTNDWIEFSVPVSKMESLLGSKYEWFVHLETGEKVPRTKQFSVPQNLHDLIDVVTPTTVLYHNMGPHAHASPQAADASGLTSPASIKSAYNVDYKGTGNTLVGTTGFLGVGASHQDYANFARQFSPGLTDFKDVSINGGSNSGDGSALEGNLDTQYCGALAAPNPSEYLAHAPEGSDGSSFNDAMLAFGNYLNANSNPPSAVSTSYGGEEDGTDPNYMDRICNEFMKAGSRGVSIFFSSGDNGVGGNGESSCYNGYYPLWPASCPYVTTVGGTEFDGSGREVVANFEQYNKNVKSPGGGFSNHFPAPSYNKNVTTAYANSLSAAQKQRLNPNGRGFPDIALVSVKYQVNVNGQISQVLGTSASSPSMAGLVGLLNDYRKTQGKPNLGFINPLLYSDKVKPALRDVTSGANKGCDSSGLPAKTGWDAASGLGSFDFAKLRTLV

SEQ ID NO: 18 - protein, 633 aa, Talaromyces proteolyticus
VPAPSKRHVVHERRDALPHSWSEPRRVDGRTQLPVRIGLTQSNIDESHDMLMDIASPSSPNYRKYMTVHEVNELFAPAGEAVSAVRDWLESAGIAAERVTQSANKQWLQFDGDAAEVESLLGAEYYIYTHDTNGRSHMGCEKYHVPEHISHHIDYIIPGVKSLEVREPQPAELEKRTFGFRKPQPPLFKALPESLETIINSILGGLLDLCSTVITPSCIKTLYNITEGTTATKGNELGIFEDLGDYYSQTDLDLFFTLFYSQIPAGTGPTLKGIDGAQAPTQTLTQAGPESDLDFQVSYPIIWPQNSILFQTDDANYEANYTFNGFLNNFLDAIDGSYCTYSAFGIDGNTADDPPYPDPASNGYKGSLQCGVYEPTNVISISYGGDEAGLSVNYQKRQCNEYKKLGLQGVSVVVSSGDSGVAGADGCLGGGKIFNPDFPAGCPYITTVGATYLPSGASSTSDSEVAVSRFPSGGGFSNIYSQPSYQSDAVNTYLTQHTPPYPAYETSDNSSVGANGGIYNKAGRGYPDVAAVGDNIVIFNAGAPTLIGGTSASAPIFASILTRINEVLLAKKGTTVGFVNPTLYANPDAFHDITSGDNPGCSTNGFSTAPGWDPVTGLGTPNYPALLKVFLGE

SEQ ID NO: 19 - protein, 371 aa, Penicillium ranomafanaense
VPTGGKKSFTVNQVAVSATKTQNFANNYARALAKYGAKVPTHVQAAAQQSGSATTTPESDDEEYLTPVNVGGTTLNLDFDTGSADLWVFSSELPASEQTGHSLYKPNNGTKLSGYTWSISYGDGSSASGDVYRDTVSVGGVKATGQAVEAASTISQQFTQDQNNDGLLGLAFSSINTVKPKSQTTFFDTVKSTLASPLFAVSLKHNAPGSYDFGFIDKSKYTGSLTYTDVDSSQGFWGFTADSYKIGSTTGSSIKGIADTGTTLLLLDDEVVSAYYKQVSGAASDSSAGGYTFDCSSTLPDFTVSISGYDAVVPGSLINYTPVSQGSSKCLGGIQSNSGLGFSIFGDIFLKSQYVVFDSNGPRLGFAAQSS

SEQ ID NO: 20 - protein, 578 aa, Aspergillus oryzae
EAFEKLSAVPKGWHYSSTPKGNTEVCLKIALAQKDAAGFEKTVLEMSDPDHPSYGQHFTTHDEMKRMLLPRDDTVDAVRQWLENGGVTDFTQDADWINFCTTVDTANKLLNAQFKWYVSDVKHIRRLRTLQYDVPESVTPHINTIQPTTRFGKISPKKAVTHSKPSQLDVTALAAAVVAKNISHCDSIITPTCLKELYNIGDYQADANSGSKIAFASYLEEYARYADLENFENYLAPWAKGQNFSVTTFNGGLNDQNSSSDSGEANLDLQYILGVSAPLPVTEFSTGGRGPLVPDLTQPDPNSNSNEPYLEFFQNVLKLDQKDLPQVISTSYGENEQEIPEKYARTVCNLIAQLGSRGVSVLFSSGDSGVGEGCMTNDGTNRTHFPPQFPAACPWVTSVGATFKTTPERGTYFSSGGFSDYWPRPEWQDEAVSSYLETIGDTFKGLYNSSGRAFPDVAAQGMNFAVYDKGTLGEFDGTSASAPAFSAVIALLNDARLRAGKPTLGFLNPWLYKTGRQGLQDITLGASIGCTGRARFGGAPDGGPVVPYASWNATQGWDPVTGLGTPDFAELKKLALGN

SEQ ID NO: 21 - protein, 456 aa, Talaromyces liani
APASTTKDNVSSVVKNGVTYTVFEHAATGAKMEFVKNSGICETTPGVNQYSGYLSVGNNMNMWFWFFEARNNPQTAPLAAWFNGGPGCSSMIGLFQENGPCHFVNGASTPSLNEYSWNNYANMLYVDQPIGVGFSYGTDDVTSTVTAAPYVWKLLQAFYAQFPEYQSRDFAIFTESYGGHYGPEFAAYIQEQNSGIAAGSVSGENINLIALGVNNGWIDPAIQEKAYIDFSYNNSYQQLIDDSQRTNLLSDYNDQCLPAIQQCAQTGRNSDCQNADNVCYDTIEGPISSSGNWDVYDIREPSNDPYPPSTYSSYLSNSRVVKAIGAQTSYQECPNGPYNKFASTGDNPRSFLSTLSSVVQSGIHVLVWAGDADWICNWLGNYRVANAVDFPGHAEFSAKALAPYTVNGTEKGMFKNVDNFSFLKVYGAGHEVPYYQPATALQVFEQILQNKSITST

SEQ ID NO: 22 - protein, 589 aa, Thermoascus thermophilus
EVFERLRAVPEGWRFSATPSDDQPIRLQIALQQHDVEGFERAVLDMSTPSSPNYGKHFQSHDEMKRMLLPSDDAVDAVLDWLQSAGITDIEEDADWINFRTTVGVANELLDTQFQWFVSETSSHVRRLRALEYSIPESVTPHIHMVQPTTRFGQIGRHHTTSREKPIVSGADIHASIAGANNQTTGTDCNTEITPKCLQDLYKFGGYKASANSGSKVGFCSYLEEYARYDDLALFEEALAPYAAGQNFSVITYNGGLNDQHSSSDSGEANLDLQYIVGVSAPLPVTEFSTGGRGELVPDLDQPNPADNSNEPYLDFLQNVLKLDQKDLPQVISTSYGENEQSVPEKYARSVCNLFMQLGSRGVSVIFSSGDSGVGSACLTNDGKNQTRFMPQFPASCPWVTSVGSTQHIAPEEATYFSSGGFSDLWPMPDYQKSAVGEYLDRLGSKWAGLYNPQGRGFPDVAAQGVNFNVYDKGSLKRFDGTSCSAPTFAGVIALLNDARLRARQPPMGFLNPWLYGAGKGGLNDIVNGGSTGCDGNARFGGAPNGSPVVPFASWNATQGWDPVSGLGTPDFSRLLKLAVPSRVGGRLA

SEQ ID NO: 23 - protein, 413 aa, Pyrococcus furiosus
AELEGLDESAAQVMATYVWNLGYDGSGITIGIIDTGIDASHPDLQGKVIGWVDFVNGRSYPYDDHGHGTHVASIAAGTGAASNGKYKGMAPGAKLAGIKVLGADGSGSISTIIKGVEWAVDNKDKYGIKVINLSLGSSQSSDGTDALSQAVNAAWDAGLVVVVAAGNSGPNKYTIGSPAAASKVITVGAVDKYDVITSFSSRGPTADGRLKPEVVAPGNWIIAARASGTSMGQPINDYYTAAPGTSMATPHVAGIAALLLQAHPSWTPDKVKTALIETADIVKPDEIADIAYGAGRVNAYKAINYDNYAKLVFTGYVANKGSQTHQFVISGASFVTATLYWDNANSDLDLYLYDPNGNQVDYSYTAYYDFEKVGYYNPTDGTWTIKVVSYSGSANYQVDVVSDGSLSQPGSSP

SEQ ID NO: 24 - protein, 387 aa, Trichoderma reesei
LPTEGQKTASVEVQYNKNYVPHGPTALFKAKRKYGAPISDNLKSLVAARQAKQALAKRQTGSAPNHPSDSADSEYITSVSIGTPAQVLPLDFDTGSSDLWVFSSETPKSSATGHAIYTPSKSSTSKKVSGASWSISYGDGSSSSGDVYTDKVTIGGFSVNTQGVESATRVSTEFVQDTVISGLVGLAFDSGNQVRPHPQKTWFSNAASSLAEPLFTADLRHGQNGSYNFGYIDTSVAKGPVAYTPVDNSQGFWEFTASGYSVGGGKLNRNSIDGIADTGTTLLLLDDNVVDAYYANVQSAQYDNQQEGVVFDCDEDLPSFSFGVGSSTITIPGDLLNLTPLEEGSSTCFGGLQSSSGIGINIFGDVALKAALVVFDLGNERLGWAQK

SEQ ID NO: 25 - protein, 408 aa, Rhizomucor miehei
RPVSKQSESKDKLLALPLTSVSRKFSQTKFGQQQLAEKLAGLKPFSEAAADGSVDTPGYYDFDLEEYAIPVSIGTPGQDFLLLFDTGSSDTWVPHKGCTKSEGCVGSRFFDPSASSTFKATNYNLNITYGTGGANGLYFEDSIAIGDITVTKQILAYVDNVRGPTAEQSPNADIFLDGLFGAAYPDNTAMEAEYGSTYNTVHVNLYKQGLISSPLFSVYMNTNSGTGEVVFGGVNNTLLGGDIAYTDVMSRYGGYYFWDAPVTGITVDGSAAVRFSRPQAFTIDTGTNFFIMPSSAASKIVKAALPDATETQQGWVVPCASYQNSKSTISIVMQKSGSSSDTIEISVPVSKMLLPVDQSNETCMFIILPDGGNQYIVGNLFLRFFVNVYDFGNNRIGFAPLASAYENE

SEQ ID NO: 26 - protein, 548 aa, Lenzites betulinus
KPMGRNLKVHEAREEIPDGFSLQGSAAPDTTLKLRIALVQSNFAELEQKLYDVSTPSSPNYGAHLSKEEVEQLVAPSADSVDAVNAWLKENDLSAQTISPAGDWLAFEVPVSKANELFDADFSVFTHDQTGLEAIRTMSYSIPAELQGHLDLVHPTVTFPNPYSHLPVVRSPIKASQNLTSRATIPASCASTITPACLQDIYGIPTTKATQSSNKLAVSGFIDQFANSADLATFLKKFRTDISSTTTFALQTLDGGSNSQSGSQAGVEANLDIQYTVGLASGVPVTFISVGDNFQDGDLEGFLDIINFLLAESAPPQVLTTSYGQNENTISVKLANQLCNAYAQLGARGTSILFASGDGGVSGSQSSSCSKFVPTFPSGCPFMTSVGATQGVNPETAADFSSGGFSNYFGIPSYQATAVKTYLTALGTTNSGKFNTSGRAFPDVSTQGVDFEIVVDGRTEGVDGTSCASPTFAAIISLVNDKLIAAGKSPLGFLNPFLYSTGASAFTDITSGSNPGCNTKGFPAKAGWDPVTGLGTPNFAKLLAAAGV

SEQ ID NO: 27 - protein, 547 aa, Neolentinus lepideus
GPAPRNLVLHESRDGVPEGFVKSSTASPDTTLKLRIALVQGDMASLEKALYDVSVPSSPLYGQHLSKQEVEEYVKPTQESVDAVNQWLSSEGITANTISPAGDWLQFSVPVSKANEMFDADFSVFTHTESGQQAIRTLSYSIPKELVGHLDLVHPTITFPNPYSHLPVVSSPAPRNLTIDASVPSSCGSTITPTCLQDLYGIPTTAATQSSNKLAVSGFIDQYANKADLKSFLTTYRKDISSSTTFTLETIDGGENPQDGSDAGVEANLDTQYTVGLATGVPTYFISVGDDYQDGDLEGFLDIVNYLLSMDQPQQVLTTSYGQNENTMSRSLANNLCNAYMQLGARGTSILFASGDGGVSGSQSGSCGSKFVPTFPSGCPYLTSVGATTGINPEVAASFSSGGFSNYWGVPSYQQSVVSSYISGLGSTNKGKYNSSGRGFPDVSAQGENVEIVVDGSTEGVDGTSCSSPIFASIVSLLNDELIAAGKSPLGFLNPFLYSDGASAFNDITSGDNPGCNTNGFSAKSGWDPVTGLGTPNYAKLRTAVGF

SEQ ID NO: 28 - protein, 399 aa, Thermococcus sp.
VSAEKVRVIITIDKDFNENSVFALGGNVVARGKVFPIVIAELSPRAVERLKNAKGVVRVEYDAEVQVLKGKSPGAGKPKPSQPAQTIPWGIERIKAPDVWSITDGSSSGVIEVAILDTGIDYDHPDLAANLAWGVSVLRGKVSTKPKDYKDQNGHGTHVAGTVAALNNDIGVVGVAPAVEIYAVRVLDASGRGSYSDIILGIEQALLGPDGVLDSDGDGIIVGDPDDDAAEVISMSLGGLSDVQAFHDAIIEAYNYGVVIVAASGNEGASSPSYPAAYPEVIAVGATDVNDQVPWWSNRGVEVSAPGVDVLSTYPDDSYETLSGTSMATPHVSGVVALIQAAYYNKYGSVLPVGTFDDNTMSTVRGILHITADDLGSSGWDADYGYGIVRADLAVQAVN

SEQ ID NO: 29 - protein, 396 aa, Thermococcus sp.
EKVRVIITIDKDFNENSVFALGGNVVARGKVFPIVIAELSPRAVERLKNAKGVVRVEYDAEVQVLKGKSPGAGKPKPSQPAQTIPWGIERIKAPDVWSITDGSSSGVIEVAILDTGIDYDHPDLAANLAWGVSVLRGKVSTKPKDYKDQNGHGTHVAGTVAALNNDIGVVGVAPAVEIYAVRVLDASGRGSYSDIILGIEQALLGPDGVLDSDGDGIIVGDPDDDAAEVISMSLGGLSDVQAFHDAIIEAYNYGVVIVAASGNEGASSPSYPAAYPEVIAVGATDVNDQVPWWSNRGVEVSAPGVDVLSTYPDDSYETLSGTSMATPHVSGVVALIQAAYYNKYGSVLPVGTFDDNTMSTVRGILHITADDLGSSGWDADYGYGIVRADLAVQAVN

SEQ ID NO: 30 - protein, 572 aa, Thermomyces lanuginosus
APFQVVERLSAPPDGWIKKEKAAPSAQIQFRLGLPQQNSEQLEQLALNIATPGHELYRKHLKRDEIKALVRPLASVSEKVLAWLRDEGVPEDRIHDDGAWIKFTVPVSTAEKLLNTEFFVFHNERTGAEQIRTLEYSVPQDIHSLVKFIQPTTHFSSLGPQVRRVVPLDVLPKLRITLEDCNKKITPDCLKQLYKIGDYVAPEDPRNRIGISGYLEQFARYADFEEFLESYAPDRTDANFTVVSINGGRNDQNSTLDSTEASLDIDYAVTLSYKTQAVYYTTAGRGPLVPDESQPDPNEVSNEPYMEQLQFLLDLPDEELPTVLTTSYGENEQSLPGSYADETCNMFRLLGMRGVSVIFSSGDWGTGIVCKANDGSERIKFDPVYPASCPYVTSVGGTTGVNPERAVEFSSGGFSDRFPRPKYQDEAVRSYLTKLGDHWKGLYNESGRAFPDVAAQADNFVVRDQGQWVSVGGTSASAPVFAAIIANVNAELLKAGKPPLGFLNPWLYGLKGRGFTDVVHGGSTGCPGTVPWTGLPAGHVPYASWNATEGWDPVTGLGTPLYDELVKAALGK

SEQ ID NO: 31 - protein, 397 aa, Thermococcus thioreducens
EKPELVRVIVHVDRGHFNTADVATIGGHVVYQFKLIDAVVVEVPSTAVGRLKKLPGVKMVEFDHKARILAGPPSWLGGGQPSQQIPWGISRVRAPDVWGITDGSGGVIEVAVLDTGVDYDHPDLAGNIAWCVSTLRGRVTTNPAQCKDQNGHGTHVIGTIAALNNDIGVVGVAPGVEIYSIRVLDASGSGSYSDIAIGIEQALLGPDGILDKDGDGIIVGDPDDDAAEVISMSLGGPTDDQYLHDMIITAYNYGVVIVAASGNEGASSPSYPAAYPEVIAVGASDVNDQIASWSNRQPEVSAPGVDILSTYPDDTYETLSGTSMATPHVSGVVALIQAAYYNKYGKVLPVGTFDDMGTNTVRGILHVTADDLGDAGWDIYYGYGIVRADLAVQAAIG

SEQ ID NO: 32 - protein, 549 aa, Polyporus arcularius
KPMARSMKLHESREGIPEGFSLRGAAQPEQTIKLRLALVQSNFAELERKLMDVSTPSSANYGKHLSKAEVQQLVAPTQDSVDAVKSWLKENDISAKTISATGDWLSFEVPVSKANELFDADFSIYTHDETGTEAVRTLSYSIPAELQGHLDLVHPTVTFPNPRGLPPVFTAPIKAEAQNLTSRATIPSSCARTITPACLQAIYNIPSTPATESSNKLAVTGFIEQFANKADLKTFLTRFRTDISSSTSFTLQTLDGGSNPQSSSEAGVEANLDIQYTVGVATGVPTVFISVGEDFQDGDLEGFLDVVNSLLDEDTPPFVMTTSYGQNENTISRNLANNLCNAYAQLGARGVSILFASGDGGVAGSQSASCSKFVPTFPSGCPFMTSVGATQGFSPETAADFSSGGFSNYFAIPDYQTSAVSGYIKALGNTNSGKYNATGRGFPDIATQGVNFEVVVGGQSGTVEGTSCSSPTLASIISLLNDRLIAAGKSPLGFLNPFLYSTGTSALNDITSGSNPGCNTNGFPAKAGWDPVTGLGTPDFNKLLSAVGL

SEQ ID NO: 33 - protein, 548 aa, Ganoderma lucidum
KSTTRNLKLHETRQGAPSGFSHTGSADPNQTLKLRLALVQGNTAELERKLYDVSTPSSANYGKHLSKEEVRQLVAPAQGSVDAVNAWLRENGITAKSTSAAGDWLSFEVPVSKANELFDADFSVFKHDDTGVKAVRTLSYSIPAELQGHLDLVHPTVTFPNPNGHMPVFQAPVKDTDAVQNFSARAVPSSCSNTITPACLQALYNIPSDAATQSSNKLAVTGFIEQYANQVDLAVFLKQYRADISSNTTFALQTLDGGSNSQTNVPGVEANLDIQYTVGIATGVPTVFISVGDQYQDGDLEGFLDVINFLLDEDTPPYVVTTSYGQDEHTISRKLAQNLCNAYAQLGARGVSILFASGDGGVAGSRSNSCSKFVPTFPSGCPYMTSVGATQGVPETAADFSSGGFSNYFGTPDYQASAVKSYLSTLGSTNRGKFNASGRGFPDVATQGVNFEVIVDGEVEGVSGTSAASPMFAAIVALLNDKLIAAGKSPLGFLNPFLYSKGVEALNDITTGSNPGCGTIGFPAKEGWDPVTGLGTPDFQKLASAAGL

SEQ ID NO: 34 - protein, 548 aa, Ganoderma lucidum
KTATRNLKLHETSQGAPSGFSLTGSADPDQTLKLRLALVQGNVAELERRLYDVSTPSSPNYGKHLSKSEVQQLVAPAQDSIDAINAWLKENGISAKTTSATGDWLSFEVPVSKANELFDADFSVYKHHDTGMEVVRTLSYSIPAELQAHLDLVHPTVTFPNPKGHPPVFQAPAMITNDVQNFSAGAVPSSCSSRITPACLQALYNIPSDPATQPSNKLAVTGYIEQYANQDDLAVFLKEYRADMSSNTTFTLQTLDGGVNSQTDEAGIEANLDVQYTVGIATGVPTVFISVGDQYQDGNLEGFLDVVNFLLDEDTPPYVMTTSYGQDEHTMSRKLAQNLCNAYAQLGARGVSILFASGDGGVAGSRSSSCSKFVPTFPSGCPYMTSVGATQGVPETAADFSSGGFSNYFGIPDYQASAVSGYLSALGHTNKGKYNASGRGFPDVSTQGVNFEVMVDGALEGVSGTSAASPTFAAVVALLNDRLIAAGKSPLGFLNPFLYSKGVSALNDITSGSNPGCRTNGFPAKEGWDPVTGLGTPDFQKLASAAGL

SEQ ID NO: 35 - protein, 541 aa, Ganoderma lucidum
KPTARNLRLHETRQGAPSGFSLTGSADPNQTVRLRLALVQGNTGELERKLYDVSTPSSANYGKHLSKAEVQQLVAPAQGSIDAVNAWLKENDITAKTISATGDWLSFEVPVNKANELFDADFSVFKHDDTGMEAVRTLSYSIPAELQGHLDLVHPTVTFPNPKGNLPLFQTPIKSKRDVPADCSNNITPACLQALYNIPSDAATQSSNTLAVTGYIEQYANQQDLTSFLGQFRPDISSNTTFALQTIDGGSNSQNGSDAGGEANLDIQYTVGLATGVPTVFISVGEQYQDGDLGGLLDVINFVLAEDAPPNVITTSYGQNENTISLKLAQNLCNAYAQLGARGVSILFASGDGGVAGSQSDNCTQFVPTFPSGCPYMTSVGATQGVPETAADFSTGGFSNLFSVPDYQAAAVQSYLSALGGTYQGLFNASGRAFPDVSTQGVNFETVVDGSVSGASGTSAASPTFAAIVALLNDRLVAAGKSPLGFLNPFLYSTGASALNDIATGSNPGCGTNGFSAQKGWDPVTGLGTPDFQKLAAAAGL

SEQ ID NO: 36 - protein, 547 aa, Trametes sp.
TPTGRNLKLHEAREDIPTGYSLRGAASPDTTLKLRLALVQNNFAELEDKLYDVSTPSSANYGNHLSKEEVEQYIAPAPESVKAVNAWLTENGLDAHTISPAGDWLAFEVPVSKANELFDADFSVFTHDESGLEAIRTLAYSIPAELQGHLDLVHPTVTFPNPNAHLPVVRSTKPIQNLTGRAIPASCASTITPACLQAIYGIPTTKATQSSNKLAVSGFIDQFANSADLKSFLSTFRKDISSSTTFALQTLDGGQNNQSPSQAGIEANLDIQYTVGLATGVPVTFISVGDNFQDGDLEGFLDIINFLLSESNPPQVLTTSYGQNENTISAKLANQLCNAYAQLGARGTSILFASGDGGVAGSQSSSCRNFVPTFPSGCPFMTSVGATQGVSPETAADFSSGGFSNVFGIPSYQTSAVSGYLSALGNTNSGKFNRSGRGFPDVATQGVNFQIVSGGDTGGVDGTSCASPTFASVISLINDRLIAAGKSPLGFLNPFLYSAAGKAALNDVTSGSNPGCNTNGFPAKAGWDPVTGLGTPNFAKLLTAVGL

SEQ ID NO: 37 - protein, 553 aa, Cinereomyces lindbladii
KPTARNLLVHESLDGVPTGFQLVGPASPDTVLSMRIALVQSDPAGLEAALYDVSTPSSASYGNHLSKAEVEKFVSPTSESVQAVNAWLTENDLTATQLSPAGDWLGFEVPVSKAEDLFGTQFSVFTHEATGMQTVRTLSYSIPSELQGHLDLVFPTINFPDPNANLPVFRHASKKREVTTLNANLTSDAVPSSCADTITPACLQALYGIPTTPATSSTNQLGVSGFIDQFANQADLKTFLQNFRTDISSSTTFSLETLDGGSNSQNRGDAGVEANLDTQYTVGLATDVPTVFISVGEDNQDGSLGGFLDIINFLLDQDSPPQVLTTSYGQNENTVSRAVANNLCNAYAQLGARGTSILFASGDGGVSGSQSASCRTFVPTFPSGCPFMTSVGATTGINPETAATFSAGGFSNYFGTPSYQASAVSSYLAALGSTNSGKFNTSGRGYPDVSTQGENFEIVVSGEEEGVDGTSCASPTFASIISLVNDRLIAAGKPPLGFLNPFLYSTGASAFTDITTGDNPGCNTNGFPAKSGWDPVTGLGTPNFSKLLTAVGL

SEQ ID NO: 38 - protein, 559 aa, Trametes versicolor
AVASTLQLHEARKGIPAGFSLHGAASPDTVLNLRMALVQSNFAGLEERLYDVSTPSSANYGKHLSKAEVEQYVAPRQQSITAVKAWLAANGLSGTSISPAGDWIAAKVPVSKANKLLGAQFSVFNNDATGRQIIRTLAYSIPAELKGHLDLVHPTITFADIKPLVPVVSARRESRVLVDSDLVANTIPASCNAAITPACLQDLYGIPSTPATQSSNQLGVSGFIDQFANQADLATFLTEFRPDVSNSTTFTLQTLDGGQNPQDPSDAGVEANLDTQYTVGVATNVPTTFFSVGDDTKDGIFGFLDLISFLLAAAAPPQVLTTSYGADEGGLSANLVRNLCQAYAQLGARGTSILFSSGDGGVSGSQAEGCVDFVPTFPSGCPFLTSVGATQLTTASGLTVETAAGFSSGGFSNYFPTPPYQQAVVDAYIKKTLVNGTVNEGLFNASGRAFPDVSAVGVDYLIVVGGGTDIVSGTSASSPLFASVIALINDRRLAAGKPPLGFLNPFLYSQAGASALNDVTVGSNPGCASPGFPAAQGWDPVTGLGTPNFAKLLAAALAL

SEQ ID NO: 39 - protein, 541 aa, Paecilomyces hepialid
APAPHGPLVKFGEIRKLPSKWVATGAADANAVIKGQIGIKQNNIQGLQAKLADIADPNSPNYGQWLSKEEVDKYSAPAAADVAAVKAWLASSGITDVTMPTNDWIEFSVPVSKMESLLGSKYEWFVHLETGEKVPRTKEFSVPQNLHDLIDVVTPTTVLYHNINPHTHSSPQAAGAAGLTSPASIKSAYNVDYKGTGNTLVGTTGFLGVGASHTDYANFGQQFSPGLKDFQDVSVNGGSNSGDGSALEGNLDTQYCGALAAPNPSEYLAHAPEGSDNNSFNDAMLAFGNYLNSARNPPSAVSTSYGGEEDGVDASYLDRICNEFMKAGSRGVSIFFSSGDNGVGGNGESSCQNGYYPLWPATCPYVTTVGGTEFDNSGREVVANFEQYNKNIKSPGGGYSNHFAAPSYNKAVTTSYANGLAAPQKQRLNPNGRGYPDISLVSVKYQVNVNNQISQVLGTSASSPSIAGLVGLLNDYRKTQGKPNLGFINPLLYSDKVKPALRDVTSGSNKGCDSVGLPAKTGWDAASGLGSFDFGKLRTLV

SEQ ID NO: 40 - protein, 541 aa, Isaria tenuipes
APAPHGPLVKFGELKKLPSQWVATGAANGDAVIKAQIGIKQNNIKGLQDKLAEISDPNSPSYGQWLSKEEVAKYTAPADADVAAVKAWLSSAGITEVTMPTNDWLEFSVPVSKMESLLGSKYEWFVHLETGEKAPRTKEFSVPQNLHGIIDVVTPTTVLYHNINPNSHGNELSASASGLTSPASIKSAYNVDYKGTGNTLVATTGFLGVGASHNDYLAFGHQFSPGLKDFQDVSVNGGSNSGDGSALEGNLDTQYCGALASPNPSQYLANSPEGSDNNSFNDAMTAFGNYLNSASNPPSAVSTSYGGEEDGVDAGYLDRICNEFMKAGSRGISVFFSSGDNGVGGNGEPSCQNGYYPLWPATCPYVTTVGGTEFDDSGREVVANFEQYNKNVKSPGGGYSNHFPAPDYNKNVTTAYANSLSAAQQQRLNPNGRGFPDISLVSVKYQVSLNGQTKQVLGTSASSPSVAGLVGLLNDYRKTQGKSNLGFLNPLLYSGKVNAALRDVTSGSNKGCDSVGLPAKSGWDAASGLGSFDFAKLRSLI

SEQ ID NO: 41 - protein, 578 aa, Aspergillus tamarii
EAFEKLSAVPKGWHYSSTPEGSTSVCLKIALAQKDAAGFEKRVYEMSDPDHPNYGQHFTTHEEMKRMLLPRDDTVDAVRQWLENGGVTDVRQDSDWINFCTTVDTANKLLNAQFKWYVSDVKHIRRLRTLQYDVPGSVASHVNTIQPTTRFGKITPKKAVTHSKPSQLDVTALAAAVVAKNISHCDSIITPTCLKELYNIGDYQADANSGSKIAFASYLEEYARYADLENFENYLAPWAKGQNFSVITYNGGLNDQNSSSDSGEANLDLQYILGVSAPLPVTEFSTGGRGPLVPDLTQPDPNANSNEPYLEFFQNVLKLDQEQLPQVISTSYGENEQEIPEKYARTVCNLIAQLGSRGVSVLFSSGDSGVGEGCMTNDGTNRTHFPPQFPAACPWVTSVGATYKTTPERATYFSSGGFSDYWARPEWQEEAVSSYLETIGDAFKGLYNASGRAFPDVAAQGMNFAVYDKGTLGEFDGTSASAPAFSAIIALLNDARLRAGKPTLGFLNPWLYKTGRQGLQDITLGASTGCTGRARFGGAPDGGPVVPFASWNATQGWDPVTGLGTPDFAELKKLALAN

SEQ ID NO: 42 - protein, 587 aa, Aspergillus brasiliensis
EIFEKLSGVPNGWRYANNPQGNEVIRLQIALQQHDVTGFEQAVMDMSTPGHADYGKHFRTHEEMKRMLLPSDTAVDSVRDWLESAGVHNIQVDADWIKFHTTVTKANALLDADFKWYVSEARHIRRLRTLQYSIPDALVSHINMIQPTTRFGQIQPNRATMRSKPKHADETFLTAATLAQNTSHCDSIITPSCLKQLYNIGDYQADPKSGSKIGFASYLEEYARYADLEKFEQHLAPNAIGQNFTVVQFNGGLNDQLSTKDSGEANLDLQYILGVSAPLPVTEYSTGGRGELVPDLSSPDPNDNSNEPYLDFLQNILKLNNSDLPQVISTSYGEDEQTIPVPYARAVCNLYAQLGSRGVSVIFSSGDSGVGAACLTNDGTNRTHFPPQFPASCPWVTSVGATSKTSPEQAVSFSSGGFSDLWPRPSYQHAAVQTYLTEHLGNKFSGLFNASGRAFPDVSAQGVNYAVYDKGILGQFDGTSCSAPTFSGVIALLNDARLRAGLPVMGFLNPFLYGAGSKLGGLNDIVTGGSVGCDGRNRFGGTPNGSPVVPFASWNATTGWDPVSGLGTPDFAKLKVVALGESEGDEN

SEQ ID NO: 43 - protein, 582 aa, Aspergillus iizukae
EVFDTLAAVPKGWHYSHTPRADQPISLKIALKQHNVEGFEQAVLDMSTPGHEHYGKHFREHDEMKRMLLPSDATVDAVKDWLLAADVTDYEVDADWINLHTTVQQANELLDTEFAWYVSDVRAVRRLRTLRYSVPDAVAPHINMVQPTTRFGQIHPDRATFRAGSTHFGAHILSAMSAVGDVSSANVTCDDVITPLCLKELYKVDGYRAEAEHGSKIAFASYLEEYARYDDMVRFQEKLAPYAKGENFSVILYNGGVDDQQSTSDSGEANLDLQTIMGLSAPLPITEYITGGRGKLIPDLSQPDPNDNSNEPYLEWIQNVLKHSPEELPQVISTSYGEDEQTIPRGYAESVCNLLAQLGSRGVSVIFSSGDSGVGSACQTNDGTNTTHFPPQFPASCPWVTSVGATSKTHPEEAVYFSSGGFSDLWARPAWQDDAVSTYIESIGGKFAGLYNASGRAFPDVSAQGQNYAIFDKGRLGKMDGTSCSAPAFAGIVSLLNDARLRANRPVLGFLNPWLYGTAREGLNDIVHGGSKGCDGRDRFGGKPNGSPVVPYASWNATPGWDPVSGLGTPNFATLVQVALHD

SEQ ID NO: 44 - protein, 456 aa, Penicillium sp.
APASTAKDSVSSVVKNGVKYTVFEHAATGAKMEFVKNSGICETTPGVNQYSGYLSVGSNMNMWFWFFEARNNPQQAPLAAWFNGGPGCSSMIGLFQENGPCHFVNGDSTPSLNEYSWNNYANMLYVDQPIGVGFSYGTDDVTSTVTAAPYVWKLLQAFYAQFPEYESRDFAIFTESYGGHYGPEFASYIQDQNAAIKAGSVSGENINLVALGVNNGWIDSTIQEKAYIDFSYNNSYKQLIDDSQRTSLLSAYNDQCLPAIQKCTSSGSNSDCKNADSVCYNQIEGPISSSGDWDVYDIREPSNDPYPPSTYSTYLSNADVVKAIGAQSSYQECPNGPYNKFTSTGDNPRSFLSTLSSVVKSGINVLVWAGDADWICNWLGNYEVANAVDFSGHTDFSAKDLAPYTVNGTEKGLFKNVDNFSFLRVYGAGHEVPYYQPDTALQVFEQILQKKPIFST

SEQ ID NO: 45 - protein, 456 aa, Aspergillus denticulatus
STASAAKDSVSSIVKNGVKYTVFEHAATGAKMEFVKNSGICETTPGVNQYSGYLSVGDNMNMWFWFFEARNNPQQAPLAAWFNGGPGCSSMIGLFQEHGPCHFVNGEDTPSLNEYSWNNYANMLYVDQPIGVGFSYGTDDVTSTVTAAPYVWKLLQAFYAQFPEYESRDFAVFTESYGGHYGPEFASYIQQQNAAIKAGTVSGENINLIALGVNNGWIDSAIQEKAYIDFSYNNTYKQLISSSDRTRLLSVYNSQCLPAIQKCTSTGTTAACRNADSVCYNNIEGPISSSGDWDVYDIREPANDPYPPATYSTYLADPDVVKAIGAQTSYQECPNGPYNKFASTGDNPRSFLSTLSNVVKSGINVLVWAGDADWICNWLGNYEVANAVDYPGQSEFEAKDLAPYTVNGAEKGMFKNVDNFSFLRVYGAGHEVPYYQPETALQVFQQTLQKKPIFST

SEQ ID NO: 46 - protein, 456 aa, Hamigera sp.
APASTAKDTLSSIVKNGVTYNVFEHADSGAKIEFVKNSGICETTPGVNQYSGYLSVGDNMNMWFWFFEARNNPQKAPLAAWFNGGPGCSSMIGLFQENGPCHFVNGENTPSLNEYSWNNYANMLYVDQPIGVGFSYGTDDVDSTVTAAPYVWKLLQAFYAQFPEYESRDFAIFTESYGGHYGPEFAHYIQQQNAAIKSGSVKGENINLIGLGVNNGWIDSAIQEKAYIDFSYNNSYKQLIDFSQRTSLMRAYKNQCLPAIQKCYQTGTNADCTDASSVCYNNIEGPISSSGDWDVYDIREPSNDPYPPKTYSSYLSDPKVVKAIGARTNYKECPNGPYNKFSTTGDNPRSFLSTLSDVVKSGINVILWAGDADWICNWLGGYGVANAVDYPGHAQFRAKALAPYTVNGTEKGQFKTVDNFQFLKVYGAGHEVPYYQPETALQVFEQILQKKPIHST

SEQ ID NO: 47 - protein, 456 aa, Penicillium janthinellum
APASTAKDTVSSVVKDGVTYTVFEHAATGAKMEFVKNSGICETTPGVNQYSGYLSVGSNMNMWFWFFEARNNPQQAPLAAWFNGGPGCSSMIGLFQENGPCHFVNGESTPSLNENSWNNYANMIYIDQPIGVGFSYGTDRVTSTVTAAPYVWKLLQAFYAQFPEYESRDFAIFTESYGGHYGPEFASYIEQQNAAIKAGSVTGQNVNIVALGVNNGWIDATIQEKAYIDFSYNNSYQQIIDSSTRDSLLDAYNNQCLPALQQCAQSGSNSDCTNADSVCYQNIEGPISSSGDFDVYDIREPSNDPYPPKTYSTYLSDPTVVKAIGARTNYQECPNGPYNKFASTGDNPRSFLSTLSSVVQSGINVLVWAGDADWICNWLGNYAVANAVDFPGNAQFSAMDLAPYTVNGVEKGQFKTVDNFSFLKVYGAGHEVPYYQPDTALQVFKQILQKKPISST

SEQ ID NO: 48 - protein, 456 aa, Penicillium vasconiae
APASTAKDSVSSVVKNGVKYTVFEHAATGAKMEFVKNSGICETTPGVNQYSGYLSVGSNMNMWFWFFEARNNPQQAPLAAWFNGGPGCSSMIGLFQENGPCHFVNGDSTPSLNEYSWNNYANMLYVDQPIGVGFSYGTDDVTSTVTAAPYVWKLLQAFYAQFPEYESRDFAIFTESYGGHYGPEFASYIQEQNAAITAGSVSGQKINLIALGVNNGWIDSTIQEKAYIDFSYNNSYQQLIDDSQRTSLLSAYNKQCLPAIQKCTQTGSNSACQNAANVCYNNIEGPISSSGDWDVYDIREPSNDPYPPSTYSTYLANSDVVKAIGAQSSYQECPNGPYNKFASTGDNPRSFLSTLSSVVKSGINVLVWAGDADWICNWLGNYEVANAVDFSGHAEFSAKDLAPYTVNGAEKGMFKNVDNFSFLKVYGAGHEVPYYQPETALQVFEQILQKKPISST

SEQ ID NO: 49 - protein, 454 aa, Hamigera paravellanea
APSLRDKRSFVERDGVTYTVFEHAATGAKMEFVQNSGICETTPGVNQYSGYLSVGDNMNMWFWFFEARNNPTAAPLAAWFNGGPGCSSMIGLFQENGPCHFVNGESTPSLNEYSFNNYANVLYVDQPIGTGFSYGTDDVTSTVTAAPYVWKLLQAFYAQFPEYESRDFGIFTESYGGHYGPEFASYIQEQNAAIKAGSVSGDNINLVALGINNGWFDAGIQEKAYIDFSYNNSYRQIISSSQRSSYLDAYNHDCLPAIESCASSGTNSACKNAESVCYNGIEGPISSAADFDVYDVRQPSNDPYPPATYSTYLQSASVRKAIGARTKYQECPNGPYNKFETTGDNSRSFLSTLSDVVNTGITVLVWAGDADWICNWVGGHAVADAVTFARQKTFQAKPLEPYTVNGTEKGRFKTVDNFTFLRVYEAGHEVPYYQPETALQVFVQTMQKKAIFST

SEQ ID NO: 50 - protein, 453 aa, Talaromyces variabilis
AAVPQDKRSIVKRDGVTYNVFEHAATGAKMEFVKNSGICETTPGVNQYSGYLSVGDNMNMWFWFFESRNNASGAPLAAWFNGGPGCSSMIGLFQENGPCHFVNGEKKPSLNKYSFNEYANVLYVDQPIGVGFSYGTDDVTSTESAAPYVWKLLQAFYAQFPQYESRDFGIFTESYGGHYGPEFAHYLQQQNEGVKNGSVDGENINLVALGINNGWFDTQLQEGAYIDYAYSNNYKKIIDSSQRSSLEDSLKSDCLPAVKQCLSSGSDSDCENASDTCGQIESSIQQAADFDVYDVREPSNDPYPPSTYSDYLADSSVVKAIGAKSTYKECPNGPYYKFSSTGDNTRSFLSELSSVVQSGIQVLVWAGDADWICNYMGVQRVADAVEFDGSSQFSNATLKPYTVNGTKKGEYKNVDNFSYLRVYGAGHEVPYYQPAVALQVFKQTMQQQAIKST

SEQ ID NO: 51 - protein, 456 aa, Penicillium arenicola
APATHLQDKRSIVERDGVNYTVFEHAATGAKLEFVTNSGICETTSGVNQYSGYLSVGTNMNMWFWFFESRNSPSTAPLAAWFNGGPGCSSMIGLFQENGPCQFYDGASTPSLNPYSFNEYANMIYIDQPIGVGFSYGTDDVTSTVTAAPYVWKLIQAFYASFPAYESREFGLFTESYGGHYGPEFAYYIQQQNAAIASGTVTGDTIDIVALGINNGWIDSALQEKAYIEYSYNNSYKQIITSSQRTSYLSTYTNDCLPAINKCTTGGSNSACSNAADVCYNDIESPIMSDADFDVYDIRQPSNDAYPPETYVTYLQTSSVVKAIGASSTYQECPDAPYNKFATTGDNDRSFLATLSTVVQSGITVLLWAGDADWICNWVGNQYVADAVTWSGQSSFAAQTLTPYTVNGSEVGTFKTLDNLSFLRVYEAGHEVPYYQPATALQAFIQTMQKKALSST

SEQ ID NO: 52 - protein, 354 aa, Nocardiopsis kunsanensis
APAPQNPTEPAEATTMAEALERDLGLNEAEATDLIDAQESALDVDAEATEAAGEHYGGSLFDTETHDLTVLVTDSAAVPGVEAAGAEAAVVEHGVEGLDDLISDLDSAGAQEGVVGWYPEVENDTVVIETLEGADADVDALLSSAGVDPADVRVETTDEAPEVYANIVGGDAYTIGGSSRCSVGFPASDSYGQPGFVTAGHCGTTGSSVSIGNGSGVFSQSVFPGNDAAFVRGTSNFSLTNLVNRYNSGSDVAVSGSTQAPIGSQVCRSGSTTGWHCGTIQARGQTVSYPQGTVRDLTRTSVCAEPGDSGGSFISGSQAQGVTSGGSGNCSWGGTTYYQEVNPMLNSWNLNLST

SEQ ID NO: 53 - protein, 425 aa, Streptomyces parvulus
GTAPSPAAPTAAESLRADAAPPALLRAMERDLGLGREQAERRLGNEAEAGAVAGRLRADLGGDFAGAWVRGAESGTLTVATTDAADVPAIEARGAVAEVVRHSLADLGAAKSRLDRAAAHRDTAEAPVRYVDVRTNTVTVQAVRPSAARALLAAAGVDAGLARVETSAERPRPLYDLRGGEAYYINNSGRCSVGFPVTKGTQQGFATAGHCGRAGASTSGANRVAQGTFQGSVFPGRDMAWVAANSQWTATPYVSGAGGQNVQVAGSTQAPVGASVCRSGSTTGWHCGTIQQHDTSVTYPEGTITGVTRTTVCAEPGDSGGSYISGSQAQGVTSGGSGNCGSGGTTFFQPINPLLQNYGLTLKTTGGGGEDPGEPGEPGGTWAAGTVYRPGDTVTYGGATYRCLQGHQAQRGWEPANVPALWQRV

SEQ ID NO: 54 - protein, 350 aa, Saccharopolyspora endophytica
LTATIADPAGPPVSPELVTAMQRDLGLTADQAVARLGQEAVAARADSALRDALAGSYGGSYFDANLGKLVVGTTDAAKSDEVRAAGAEPRQVDASERQLDGIVEALNGRGAQVPAAVTGWYADVRENAVVVTTQPGTAEQATGFVRDAQVPQESVRVWESPAQPETYADVVGGYAYYTASGARCSMGFAVQGGFVTAGHCGAPGESTTQPTGYFAGSSFPGNDYAFVNTGTDDTGYPLVYNYSSGYVRVSGSAEAPLGSSICRSGSTTGWHCGTVLAKNQSVRYQEGTVSGLTRTNVCAEPGDSGGSFISGNQAQGMTSGGWGDCRTGGETYYQPVREALSAYGLTLLTQ

SEQ ID NO: 55 - protein, 355 aa, Luteus cellwall
ASGPLPQSPSPDSDVATTMAEALERDLNLTSTEAQELLTAQEAAFEADEAAAQAAGDAYGGSVFDTETLDLTVMVTDAAAVQAVEATGAKADVVSYGIDGLDTIIDDLNEADAPEGVVGWYPDIDSDTVVLEVLEGSGADVDALLAEAGVDASAVKVESTTEQPELYADIIGGLAYYMGGRCSVGFAATNASGQPGFVTAGHCGRVGTQVTIGNGRGVFERSVFPGNDAAFVRGTSNFTLTNLVSRYNSGGYATVSGSSVAPIGSSVCRSGSTTGWRCGTIQARGQTVTYPQGTIYNMTRTSACAEPGDSGGSFISGTQAQGVTSGGSGNCSWGGTTFYQEVNPMLNSWNLRLRT

SEQ ID NO: 56 - protein, 406 aa, Saccharothrix australiensis
GPPTTHQEESGLIAAMARDFKITPDQARARLVREAKAATTEQSLKSRLGGHYAGAWLNEGATELVVAVTDAAQAKVVEDAGATPKVVQRSQIQLDELKAKLDANKNAPKDVPAWYVDVKTNSVVVLARNTASAKAFARASGLSEADVRIEQSTEDPRPLIDVIGGNAYYMGSGGRCSVGFSVNGGFVTAGHCGRVGTTTTQPSGTFAGSTFPGRDYAWVRVSSGNTMRGLVNRYPGTVPVKGSNESSVGASVCRSGSTTGWHCGTIQQKNTSVTYPEGTISGVTRTNACAEPGDSGGSWLTGDQAQGVTSGGSGNCSSGGTTYFQPVNPILQAYGLQLVIEGGPTGTTGPTTTSSNPGGTTWQPGVAYTAGTTVTYEGVGYECLQGHTSQIGWEPSAVPALWERVG

SEQ ID NO: 57 - protein, 346 aa, Nocardiopsis baichengensis
DAFPEGTEPLAEAIERDLGVASGQADELLTAEESARSLEKEAEKAAGEAFAGAVFDTETHELTVSVADPSAVEAVEATGAETRVVEASQDELDAAMADLDAASEDGVSEEVTGWHVDLESNTVVVEALEGSEDAAEDLIADAGLDSAPVVVEKADAQPETFGAIVGGDAYYPGNSRCSIGFSVRGGFVTAGHCGSTGTSVSGSAGESGRVAGSVFPGRDMGYVRANSGWTPSPYVNNYRGGRVAVRGSNEASVGASVCRSGSTTGWHCGTIQAKNQTVNYPQGTVRGLTRTTACAEPGDSGGSWLSGNQAQGVTSGGSGNCSWGGTTFFQPVNPILSQWGLSLTTT

SEQ ID NO: 58 - protein, 353 aa, Streptomyces sp.
NDTLTERADAAVAELPAGVLDAMERDLGLSEQEAGLQLVAQYDASLLGETLSADLDAYAGSWLADGTDLVVATTDRAEAAQITEAGAKVEIVDHTLTELESVKAALDEAAESYDTTDAPVWYVDITTNDVVLLTSDTAEAKGFVEAAGVDAGAVSIQTSDEQPQAFYDLVGGDAYYMGGGRCSVGFSVTQGSTPGFATAGHCGTVGTSTTGFNQAAQGTFEESSFPGDDMAWVSVNSNWNTTPTVNDGAVTVSGSTQGAVGASICRSGSTTGWHCGTIEQHNTSVTYPEGTITGVTRTSVCAEPGDSGGSYISGSQAQGVTSGGSGNCTSGGTTYHQPINPLLSAYGLDLVTG

SEQ ID NO: 59 - protein, 353 aa, Actinoalloteichus spitiensis
DTPSPDGADATVASPEMLSAMQRDLGLTEQEALTRVAVEATAVETEDELRASLGPAFGGAHFDGDTNTLVVGVTSAAKADEVRAAGATPEVVAFSADTLDGVVSTLNETSEVPDGVTGWYVDTADNTVVVTTALGSGEAAADFVAESGVNADAVTVVESTEQPRTLYDIIGGDAYYFGGSRCSVGFSVSVGYVTAGHCGGVGTATQGYNRVSSGQVAGSVFPGSDMGYVRTNANWTPRPLVNRYSGGATVTVSGSNEAAVGASICRSGSTTGWRCGTVQAKNQTVFYAQGAVSGLTRTNACAEGGDSGGSWLSGSQAQGVTSGGSGNCTWGGTTYFQPLNPILSRWGLSLTRG

SEQ ID NO: 60 - protein, 338 aa, Byssochlamys verrucosa
FPAAVDVKRAPSSLGITLSQVSNTLIKAVVQNTGRGEVSFIHLNFFKDDAPVKKVAVYRNGSEVQFEGIQRRYKSTGLTRDAFTTLAPGKTAEDVFDIASTCDLISGGPVTIRSEGVVPYATANGIDIAGYIPYSSNELTIDVDGAIASTVSKAIAPLNRRTNISSCSGSEQSTLTMALKNAASLAHAAADAAESGSASKFSEYFKTTASSTRKTVAARLRAVAQEASSSSSGSTTYYCNDAYGYCTTNVLAYTLPSHNTIATCDLYYTNLSALTRTCHAQDQATTSLHEFTHAPGVYSPGTDDLAYGYASSTSLSSSQAVMNADSYALYANAIYVGC

SEQ ID NO: 61 - protein, 339 aa, Hamigera terricola
SPVNVNVGREELPALDVTLSQIGNTQIKAVVKNTGSEDVTFMHLNFFTDSAPVKKVSVFQNNTEVEFQGILRRVKYTDVSTDSVTTLAPGASIEDVFDIATTTDLASGGAVTVKTDGFVPILASAENKVTGYARYTSNELHLDVDGPSAATVSKAIAPLDRRTRLSSCSGSRSSALQTALRNTVSLANAAANAARSGSASKFSEYFKTTSSSVRSTVAARLSAVASEASSTSSGSTTYYCNDPYGYCSTDVLAYTLPSYNIIANCDIYYSYLPALTGSCHAQDQATTTLHEFTHAPGVYSPGTEDYGYGYNAATSLSSSQAVLNADSYALYANAIYLGC

SEQ ID NO: 62 - protein, 334 aa, Aspergillus tamarii
IPVEVPASAPGLDVTLSQVGNTRIKAVVKNTGSEEVTFVHLNFFKDAAPVQKVSLFRNATEVQFQGIKQRLITEGLSDEALTTLAPGATIEDEFDIASTSDLSEGGTITINSNGLVPITTENKVTGYIPFASNELSIDVDAAEAATVSQAVKILDRRTKVTSCSGSRSSALQTALRNTVSLARAAASAAQSGSSSRFQEYFKTTSSSTRSTVAARLNAVANEAASTASGSTTYYCSDVYGYCSSNVLAYTLPAYNIIANCDLYYSYLPALTSTCHAQDQATTTLHEFTHAPGVYSPGTDDLGYGYSAATALSASQALLNADTYALFANAVNLNC

SEQ ID NO: 63 - protein, 334 aa, Aspergillus niveus
LPAKTGEQLQKLDVALSQVDNTLIKAVVKNTGSEDITFVHLNFFRDTAPVKKVSLFRNTTEVPFHGIKQRLRSDGLSADALTVLAPGESIEDEFDIAATSDLSEGGSITISADGFVPIASGNKITGYVPFSSNELSVEVDAAQAASVASAVKPLDRRTKVASCSGSRSSALTQALRNTVSLANAAASAAQSGSSTRFQEYFKTTSSSVRSSVAARFRAVASEASSTSAGSTTYYCTDVYGYCSSNVLAYTLPAYNIIANCDIYYTYLPALTSTCHAQDQATTTLHEFTHAPGVYSPGTDDLGYGYDAATALSSSQALNNADSYALFANAVNLNC

SEQ ID NO: 64 - protein, 372 aa, Penicillium sclerotiorum
IPTGGKKSSFSVDQVAIPATKTKNFADTYARAISKFGGNVPSHVRAAAQQSGAATTTPEANDEEYLTPVNVGGTTLNLDFDTGSADLWVFSEQLPSSEQSGHSVYKPNNGTKLSGATWSISYGDGSSASGDVYKDTVSVGPVKATGQAVEAASKISAQFTRDSNNDGLLGLAFSSINTVKPKAQTTFFDTVKSSLASPLFAVTLKHNAPGTYDFGFVDSSKYTGSLAYTDVDNSQGFWEFTADSYKVGSQSGSSIKGIADTGTTLLLLDDEVVSAYYKQVSGASDSQSAGGYTFDCSADLPDFTVTISGYDAVVPGSLINYAPVSDGSSTCLGGIQSNSGIGFSIFGDIFLKSQYVVFDSNGPRLGFAAQSS

SEQ ID NO: 65 - protein, 371 aa, Penicillium bilaiae
VPTGGKKSFSINQVAIPATKTKNFAGNYAHAIAKYGGNVPSHVEAAAQQSGAATTTPESNDEEYLTPVNVGGTTLNLDFDTGSADLWVFSAELPSAEQSGHALYKPSNGTKLSGASWSISYGDGSSASGDVYKDTVSVGSVKATGQAVEAASKISAQFTKDKNNDGLLGLAFSSINTVKPKAQTTFFDTVKSSLASPLFAVTLKHNAPGTYDFGFIDKSKYTGSLAYADVDNSQGFWEFTADSYSVGSSKGSSIKGIADTGTTLLLLDDEVVSAYYKQVQGAQQDSSAGGYTFDCSSKLPDFTVTISGYDAVVPGDLINFAPASEGSSTCLGGIQSNSGIGFSIFGDIFLKSQYVVFDSNGPRLGFAAQSS

SEQ ID NO: 66 - protein, 373 aa, Penicillium antarticum
SPLVTPRKGFTINQETRAVTKSKTVNLPGVYAQALSKYGATVPQHVHAAAVSGSAVTTPEESDVEYLTPVNVGGTTLNLDFDTGSADLWVFSSELTSSQQSGHSIYKPSSSATKLSGSSWSISYGDGSSASGDVYKDTVTVGGVKATGQAVEAASKISSAFLQDVNNDGLLGLAFSSINTVSPRAQTTFFDTVKSQLDSPLFAVTLKHNAPGSYDFGYIDKSKYTGSLTYANVDDSQGFWSFTASSYKIGTTTGGSITGIADTGTTLLLLPDSVVSAYYKKVSGSQNSNYYGGYVFPCSATLPDFTVTINGYNAVVPGNLINFAQATTGSSTCYGGIQSNSGIGFSIFGDIFLKSQYVVFDSEGPRLGFAAQA

SEQ ID NO: 67 - protein, 370 aa, Penicillium sumatrense
VPTNNVASKFSVNQVSRPATKTTNFAANYGRALSKYGAGVPSHVEAAAAASGSAVTTPESNDVEYLTPVSIGGTTLNLDFDTGSADLWVFSTELSSSEQSGHSVYNPSKSGKKISGASWDISYGDGSGASGDVYTDTVTVGGVTASKQAVEAAKQISSQFQQDTDNDGLLGLAFSSINTVSPTPQKTFFDNVKSSLSQPLFAVALKHNAPGVYDFGFIDSSKHTGSIAYTSVDSSQGFWSFTVDGYKVGSKSGAGFDGIADTGTTLLLLDDSVVSAYYSQVSGAKNDNNAGGYVFDCSADLPDFSVTIGSYTATVPGSLINYGDSGDNSCIGGIQSNSGIGFSIFGDIFLKSQYVVFNANGPKLGFAPQA

SEQ ID NO: 68 - protein, 384 aa, Trichoderma lixii
LPTEGQKTASIEVTYNKNYVAHGPTALFKAKRKYGAPISDNLRAAVAAKHSLTKRQTGSANTNPSDSADDEYITSVSIGTPAQVLPLDFDTGSSDLWVFSSETPKSSASGHVTYSPSKSSTAKKLSGSTWSITYGDHSSSSGDVYTDVVSIGGFSVKTQAIESATKVSTQFVQDTVISGLVGLGFDVGNTVKPRAQKTWFSNAASSLAEPLFTADLRHQETGSYNFGFIDNSLAKGTIGYTPADGSEGYWGFTATGYSVGGAKLGRSSITGIADTGTTLLLLPDNVVDAYYNNVESAQYDDSQEGVVFDCSEDLPSFSFGVGGQTITISGDLLNLTPIEEGSSTCFGGLQSSADIGINIFGDVALKAALVVFDLGNERLGFAQK

SEQ ID NO: 69 - protein, 384 aa, Trichoderma brevicompactum
LPTEGQKTASVEVTYNQNYAAHGPTQLYKAKRKYGAPISDNLKAIVANRKALIKRQTGSAPNHPSDSADDEYITNVSIGTPAQVLPLDFDTGSSDLWVFSSETPKSSASGHTIYTPSKSSTSKKLSGATWSIEYGDKSTSSGDVYTDKVTVGGFSVSTQAVESATKVSAQFVQDTANSGLLGLAFDSINTVSPRQQKTWFSNAANSLAQPLFTANLNHQATGSYNFGFIDTSLASGPINYVPVDNSQGFWGFTASGYSVGGGKLNRSSLSGIADTGTTLLLLPDAVVNAYYANVESAEYDDEQEGVVFDCSEDLPTFSFGVGSGTITIPGDLLNLTPIDSSGQTCYGGLQSSSDIGINIFGDVALKAALVVFDLGNERLGWAQK

SEQ ID NO: 70 - protein, 379 aa, Penicillium cinnamopurpureum
IPTGVPNRKGFTVNQQVRPVTNGTKSKTLNLPAIYANALSKYGVAVPANIKAAAESGTATTTPEDNDIEYLTPVDVGGTTLNLDFDTGSADLWVFSSELPSSESSGHSIYKPSQSGKKLDGYSWKISYGDSSSASGDVYTDTVTVGGVTADGQAVEAAKKISQQFVQDKNNDGLLGLAFSSINTVQPKAQTTFFDTVKDQLDSPLFAVTLKHNAPGSYDFGFIDKSKYTGSLTYADVDKSDGFWAFTADGYSVGSGSSSSSRIKGIADTGTTLLLIDDEIVSAYYKQVDGAQESYSVGGYTFDCSTKLPDFNIKIGDYTAVIPGDVINYAPVQQGSSTCFGGIQSNSGLPFSIFGDIFLKSQYVVFDANGPRLGFAAQA

SEQ ID NO: 71 - protein, 350 aa, Bacillus lichenformis
AQPAKNVEKDYIVGFKSGVKTASVKKDIIKESGGKVDKQFRIINAAKAKLDKEALKEVKNDPDVAYVEEDHVAHALAQTVPYGIPLIKADKVQAQGFKGANVKVAVLDTGIQASHPDLNVVGGASFVAGEAYNTDGNGHGTHVAGTVAALDNTTGVLGVAPSVSLYAVKVLNSSGSGSYSGIVSGIEWATTNGMDVINMSLGGASGSTAMKQAVDNAYARGVVVVAAAGNSGSSGNTNTIGYPAKYDSVIAVGAVDSNSNRASFSSVGAELEVMAPGAGVYSTYPTNTYATLNGTSMASPHVAGAAALILSKHPNLSASQVRNRLSSTATYLGSSFYYGKGLINVEAAAQ

SEQ ID NO: 72 - protein, 360 aa, Bacillus subtilis
FSNMSAQAAGKSSTEKKYIVGFKQTMSAMSSAKKKDVISEKGGKVQKQFKYVNAAAATLDEKAVKELKKDPSVAYVEEDHIAHEYAQSVPYGISQIKAPALHSQGYTGSNVKVAVIDSGIDSSHPDLNVRGGASFVPSETNPYQDGSSHGTHVAGTIAALNNSIGVLGVAPSASLYAVKVLDSTGSGQYSWIINGIEWAISNNMDVINMSLGGPTGSTALKTVVDKAVSSGIVVAAAAGNEGSSGSTSTVGYPAKYPSTIAVGAVNSSNQRASFSSAGSELDVMAPGVSIQSTLPGGTYGAYNGTSMATPHVAGAAALILSKHPTWTNAQVRDRLESTATYLGSSFYYGKGLINVQAAAQ

SEQ ID NO: 73 - protein, 548 aa, Trametes cf versicol
TPTARNLKLHESREEIPAGFSLSGAASPDTTLKLRLALVQSNFAELEDKLYDVSTPSSANYGQHLSKEEVEQLVAPSAESVNAVNAWLTENGLTAQTISPAGDWLAFEVPVSKANELFDADFSVFTHDESGLKAVRTLAYSIPAELQGHLDLVHPTITFPNPNSHLPVVRSPVKPVQNLTSRAVPASCASTITPACLQALYGIPTTKATQSSNKLAVSGFIDQFANSADLKTFLGKFRTDISSSTTFTLQTLDGGSNSQSSSQAGVEANLDIQYTVGLASAVPTIFISVGDDFQDGDLEGFLDIINFLLNESAPPQVLTTSYGQNENTISAKLANQLCNAYAQLGARGTSILFASGDGGVSGSQSSSCSKFVPTFPSGCPFMTSVGATQGINPETAADFSSGGFSNVFARPSYQSTAVSSYLTALGSTNSGKFNTSGRAFPDIATQGVDFEIVVSGRTEGVDGTSCASPTLAAIISLLNDRLIAAGKSPLGFLNPFLYSAAGTAALTDITSGSNPGCNTNGFPAKAGWDPVTGLGTPNFAKLLTAVGL

SEQ ID NO: 74 - protein, 439 aa, Bos taurus
MAKEYFPFTGKIPFEGKDSKNVMAFHYYEPEKVVMGKKMKDWLKFAMAWWHTLGGASADQFGGQTRSYEWDKAECPVQRAKDKMDAGFEIMDKLGIEYFCFHDVDLVEEAPTIAEYEERMKAITDYAQEKMKQFPNIKLLWGTANVFGNKRYANGASTNPDFDVVARAIVQIKNSIDATIKLGGTNYVFWGGREGYMSLLNTDQKREKEHMATMLGMARDYARAKGFKGTFLIEPKPMEPSKHQYDVDTETVIGFLKAHGLDKDFKVNIEVNHATLAGHTFEHELACAVDAGMLGSIDANRGDAQNGWDTDQFPIDNFELTQAMLEIIRNGGLGNGGTNFDAKIRRNSTDLEDLFIAHISGMDAMARALMNAADILENSELPAMKKARYASFDSGIGKDFEDGKLTFEQVYEYGKKVEEPKQTSGKQEKYETIVALHCK

SEQ ID NO: 75 - protein, 591 aa, Saccharomyces cerevisiae
MLCSVIQRQTREVSNTMSLDSYYLGFDLSTQQLKCLAINQDLKIVHSETVEFEKDLPHYHTKKGVYIHGDTIECPVAMWLGALDLVLSKYREAKFPLNKVMAVSGSCQQHGSVYWSSQAESLLEQLNKKPEKDLLHYVSSVAFARQTAPNWQDHSTAKQCQEFEECIGGPEKMAQLTGSRAHFRFTGPQILKIAQLEPEAYEKTKTISLVSNFLTSILVGHLVELEEADACGMNLYDIRERKFMYELLHLIDSSSKDKTIRQKLMRAPMKNLIAGTICKYFIEKYGFNTNCKVSPMTGDNLATICSLPLRKNDVLVSLGTSTTVLLVTDKYHPSPNYHLFIHPTLPNHYMGMICYCNGSLARERIRDELNKERENNYEKTNDWTLFNQAVLDDSESSENELGVYFPLGEIVPSVKAINKRVIFNPKTGMIEREVAKFKDKRHDAKNIVESQALSCRVRISPLLSDSNASSQQRLNEDTIVKFDYDESPLRDYLNKRPERTFFVGGASKNDAIVKKFAQVIGATKGNFRLETPNSCALGGCYKAMWSLLYDSNKIAVPFDKFLNDNFPWHVMESISDVDNENWIAIIPRLSP

SEQ ID NO: 76 - protein, 444 aa, Bacillus subtilis
ETANKSNELTAPSIKSGTILHAWNWSFNTLKHNMKDIHDAGYTAIQTSPINQVKEGNQGDKSMSNWYWLYQPTSYQIGNRYLGTEQEFKEMCAAAEEYGIKVIVDAVINHTTFDYAAISNEVKSIPNWTHGNTQIKNWSDRWDVTQNSLLGLYDWNTQNTQVQSYLKRFLERALNDGADGFRFDAAKHIELPDDGSYGSQFWPNITNTSAEFQYGEILQDSASRDAAYANYMDVTASNYGHSIRSALKNRNLGVSNISHYAYDVSADKLVTWVESHDTYANDDEESTWMSDDDIRLGWAVIASRSGSTPLFFSRPEGGGNGVRFPGKSQIGDRGSALFEDQSITAVNRFHNVMAGQPEELSNPNGNNQIFMNQRGSHGVVLANAGSSSVSINTPTKLPDGRYDNKAGAGSFQVNDGKLTGTINARSVAVLYPDDIEIRCNTFFQ

SEQ ID NO: 77 - protein, 476 aa, Saccharomycopsis fibuligera
QPVTLFKRETNADKWRSQSIYQIVTDRFARTDGDTSASCNTEDRLYCGGSFQGIIKKLDYIKDMGFTAIWISPVVENIPDNTAYGYAYHGYWMKNIYKINENFGTADDLKSLAQELHDRDMLLMVDIVTNHYGSDGSGDSIDYSEYTPFNDQKYFHNYCLISNYDDQAQVQSCWEGDSSVALPDLRTEDSDVASVFNSWVKDFVGNYSIDGLRIDSAKHVDQGFFPDFVSASGVYSVGEVFQGDPAYTCPYQNYIPGVSNYPLYYPTTRFFKTTDSSSSELTQMISSVASSCSDPTLLTNFVENHDNERFASMTSDQSLISNAIAFVLLGDGIPVIYYGQEQGLSGKSDPNNREALWLSGYNKESDYYKLIAKANAARNAAVYQDSSYATSQLSVIFSNDHVIATKRGSVVSVFNNLGSSGSSDVTISNTGYSSGEDLVEVLTCSTVSGSSDLQVSIQGGQPQIFVPAKYASDICS

SEQ ID NO: 78 - protein, 487 aa, Debaryomyces occidentalis
QPIIFDKRDVGSSADKWKDQSIYQIVTDRFARSDGSTTADCLVSDRKYCGGSYKGIIDKLDYIQGMGFTAIWISPVVEQIPDNTAYGYAYHGYWMKNIDELNTNFGTADELKQLASELHSRSMLLMVDVVYNHYAWNGDGSSVDYSSFTPFNQQSYFHDYCLITNYNDQTNVEDCWEGDTEVSLPDLSTEDNEVIGVFQTWVSDFVQNYSIDGLRIDSAKHVDTASLTKFEDASGVYNLGEVYQGDPTYTCPYQSYMKGVTNYPLYYPVYRFFSDTSATSSELTSMISTLQSSCSDVSLLGNFIENHDQVRFPSVTSDTSLIKNAMAFIILGDGIPIIYYGQEQGLNGGSDPANREALWLSGYNTDSEYYELISKLNQIRNQAIKKDSAYSTYKSSVVSSSDHYIATRKGSDANQLISIFNNLGSNGSQDITVSNTGYSSGDKVIDIISCNSVSAGDFGSLSVSISGGMPQVYAPSSVLSGSGICNQ

SEQ ID NO: 79 - protein, 487 aa, Debaryomyces occidentalis
KPIFLSKRDAGSSAAAAWRSESIYQLVTDRFARTDGSTSATCNTGDRVYCGGTFQGIIDKLDYIQGMGFTAIWISPVVEQIPDDTGYGYAYHGYWMKDIYAINSNFGTADDLKNLSNELHKRNMKLMVDIVTNHYAWNGAGSSVAYSNYNPFNQQSYFHDYCLITNYDDQTNVEDCWEGDNTVSLPDLRTEDSDVSSIFNLWVAELVSNYSIDGLRIDSAKHVDESFYPSFQSAAGVYLLGEVYDGDPAYTCPYQNYMSGVTNYPLYYPMLRFFQGTSNSVDELNAMISSLESDCKDITLLGNFIENHDQPRLPSYTSDSALIKNAIAFNLMSDGIPIIYYGQEQGYSGSSDPNNREALWLSGYSTSNGYYKLISSVNQIRNQAIYKDSKYTTYWSDVLYASGHVIALQRGADDQRIVSVFNNLGSSGSQTVTFSTKYSGGEKVVDVLTCQTSYANSDSTLTVSISGGAPRIYAPASLIANSGICNF

SEQ ID NO: 80 - protein, 570 aa, Lipomyces kononenkoae
MCGSTLSASLYVYNDDYDKIVTLYYLTSSGTTGSTLALILPVWSNNWELWTLSAIAAGAVEITGASYVDSDTSVTYTTSLDLPLTTTSASVPTGTAANWRGRSIYQVVTDRFARTDGSITYSCDVTDRVYCGGSYRGIINMLDYIQGMGFTAIWISPIVENIPDDTGYGYAYHGYWMKDIFALNTNFGGADDLIALATELHNRGMYLMVDIVVNHFAFSGNHADVDYSEYFPYSSQDYFHSFCWITDYSNQTNVEECWLGDDSVPLVDVNTQLDTVKSEYQSWVKQLIANYSIDGLRIDTVKHVQMDFWAPFQEAAGIYTVGEVFDGDPSYTCPYQENLDGVLNYPVYYPVVSAFQRVGGSISSLVDMIDTLKSECIDTTLLGSFLENQDNPRFPSYTSDESLIKNAIAFTILSDGIPIIYYGQEQGLNGGNDPYNREALWPTGYSTTSTFYEYIASLNQIRNHAIYIDDTYLTYQNWVIYSDSTTIAMRKGFTGNQIITVLSNLGSSGSSYTLTLSNTGYTASSVVYEILTCTAVTVDLSGNLAVPMSGGLPRVFYPESQLVGSGICSM

SEQ ID NO: 81 - protein, 476 aa, Lipomyces kononenkoae
KTAAEWKELSIYQVITDRFATTNLTAPDCWIRAYCGGTWKGLERKLDYIQNMGFDAVWISPVIHNIEVNTTWGFAFHGYWGDDPYRLNEHFGTAADLKSLSDSLHARGMSLMVDVVINHLASYTLPQDVDYSLYPAPFNTSSAFHQPCPIDFSNQSSIEDCWLVTEPAPALVDLKNEDQVILDALINSVVDLVETYDIDGIRLDTARHVPKPSLAKFQEKVGVFVTGEALNQSVPYVAQYQGPLNSAINYPLWYALVDSFMGRTTFDYLESVVKSEQATFSDAHALTNFLDNQDQPRFASYLGDGNGDDVLRDENAATFLFFVSGIPVIYYGFEQRFDGGFDPVNREPMWTSGYNTSTPLYNYLARLNAIRKYAASITGTQVFYSDDTVFLGSGVSHMAMQRGPLVIVLTNVGQHIIDNTGYTVTGSQFSAGDSLTDLVSCTKVKVVGANGTFTSPSNGGKARIWIKSKYAGKFCS

SEQ ID NO: 82 - protein, 626 aa, Bacillus subtilis
ETANKSNELTAPSIKSGTILHAWNWSFNTLKHNMKDIHDAGYTAIQTSPINQVKEGNQGDKSMSNWYWLYQPTSYQIGNRYLGTEQEFKEMCAAAEEYGIKVIVDAVINHTTSDYAAISNEVKSIPNWTHGNTQIKNWSDRWDVTQNSLLGLYDWNTQNTQVQSYLKRFLDRALNDGADGFRFDAAKHIELPDDGSYGSQFWPNITNTSAEFQYGEILQDSASRDAAYANYMDVTASNYGHSIRSALKNRNLGVSNISHYASDVSADKLVTWVESHDTYANDDEESTWMSDDDIRLGWAVIASRSGSTPLFFSRPEGGGNGVRFPGKSQIGDRGSALFEDQAITAVNRFHNVMAGQPEELSNPNGNNQIFMNQRGSHGVVLANAGSSSVSINTATKLPDGRYDNKAGAGSFQVNDGKLTGTINARSVAVLYPDDIAKAPHVFLENYKTGVTHSFNDQLTITLRADANTTKAVYQINNGPETAFKDGDQFTIGKGDPFGKTYTIMLKGTNSDGVTRTEKYSFVKRDPASAKTIGYQNPNHWSQVNAYIYKHDGSRVIELTGSWPGKPMTKNADGIYTLTLPADTDTTNAKVIFNNGSAQVPGQNQPGFDYVLNGLYNDSGLSGSLPH

SEQ ID NO: 83 - protein, 483 aa, Bacillus subtilis
VNGTLMQYFEWYTPNDGQHWKRLQNDAEHLSDIGITAVWIPPAYKGLSQSDNGYGPYDLYDLGEFQQKGTVRTKYGTKSELQDAIGSLHSRNVQVYGDVVLNHKAGADATEDVTAVEVNPANRNQETSEEYQIKAWTDFRFPGRGNTYSDFKWHWYHFDGADWDESRKISRIFKFRGEGKAWDWEVSSENGNYDYLMYADVDYDNPDVVAETKKWGNWYANELSLDGFRIDAAKHIKFSFLRDWVQAVRQATGKEMFTVAEYWQNNAGKLENYLNKTSFNQSVFDVPLHFNLQAASSQGGGYDMRRLLDGTVVSRHPEKAVTFVENHDTQPGQSLESTVQTWFKPLAYAFILTRESGYPQVFYGDMYGTKGTSPKEIPSLKDNIEPILKARKEYAYGPQHDYIDHPDVIGWTREGDSSAAKSGLAALITDGPGGSKRMYAGLKNAGETWYDITGNRSDTVKIGSDGWGEFHVNDGSVSIYVQK

SEQ ID NO: 84 - protein, 589 aa, Bacillus subtilis
MMEYAAIHHQPFSTDAYSYDGRTVHIKIRTKKGDADHIRFIWGDPYEYNDGKWSANEQPMRKIAATEMHDYWFAEVVPPFRRLQYAFVVTDDHEDIFFGSSGVCPYNEKTLETIHYYFKFPFVHEADTFQAPEWVKSTVWYQIFPERFANGREDLSPKNALPWGSKDPGVNDFFGGDLQGIVDKLDYLEDLGVNGIYLTPIFSAPSNHKYDTLDYFSIDPHFGDPEIFRTLVSQLHQRGMRIMLDAVFNHIGSASPQWQDVVKNGDQSRYKDWFHIHSFPVTDDNYDRFAFTADMPKLNTANPEVQKYLLDIALYWIREFDIDGWRLDVANEVDHVFWKTFRQAVSTEKPDVYILGEIWHSAEPWLRGDEFHAAMNYPFTEPMIEYFADQTISASRMAHRVNAHLMNGMKQANEVMFNLLDSHDTKRLLTRCRNDEKKARALLAFMFAQTGSPCIYYGTEIGLDGENDPLCRKCMVWEKEKQNQDMLQFMKRLIALRKQENTLLTEGHLEWNLLDDKNDFISFSRTLDEKILIYFFNQGNVVQHISLRELNIDRNNKICDAWTEQPLHYHDVIAVQPGEFLILSAAAPV

SEQ ID NO: 85 - protein, 483 aa, Bacillus lichenformis
ANLNGTLMQYFEWYMPNDGQHWKRLQNDSAYLAEHGITAVWIPPAYKGTSQADVGYGAYDLYDLGEFHQKGTVRTKYGTKGELQSAIKSLHSRDINVYGDVVINHKGGADATEDVTAVEVDPADRNRVISGEHLIKAWTHFHFPGRGSTYSDFKWHWYHFDGTDWDESRKLNRIYKFQGKAWDWEVSNENGNYDYLMYADIDYDHPDVAAEIKRWGTWYANELQLDGFRLDAVKHIKFSFLRDWVNHVREKTGKEMFTVAEYWQNDLGALENYLNKTNFNHSVFDVPLHYQFHAASTQGGGYDMRKLLNGTVVSKHPLKSVTFVDNHDTQPGQSLESTVQTWFKPLAYAFILTRESGYPQVFYGDMYGTKGDSQREIPALKHKIEPILKARKQYAYGAQHDYFDHHDIVGWTREGDSSVANSGLAALITDGPGGAKRMYVGRQNAGETWHDITGNRSEPVVINSEGWGEFHVNGGSVSIYVQR

SEQ ID NO: 86 - protein, 478 aa, Aspergillus niger
ATPADWRSQSIYFLLTDRFARTDGSTTATCNTADQKYCGGTWQGIIDKLDYIQGMGFTAIWITPVTAQLPQTTAYGDAYHGYWQQDIYSLNENYGTADDLKALSSALHERGMYLMVDVVANHMGYDGAGSSVDYSVFKPFSSQDYFHPFCFIQNYEDQTQVEDCWLGDNTVSLPDLDTTKDVVKNEWYDWVGSLVSNYSIDGLRIDTVKHVQKDFWPGYNKAAGVYCIGEVLDGDPAYTCPYQNVMDGVLNYPIYYPLLNAFKSTSGSMDDLYNMINTVKSDCPDSTLLGTFVENHDNPRFASYTNDIALAKNVAAFIILNDGIPIIYAGQEQHYAGGNDPANREATWLSGYPTDSELYKLIASRNAIRNYAISKDTGFVTYKNWPIYKDDTTIPMRKGTDGSQIVTILSNKGASGDSYTLSLSGAGYTAGQQLTEVIGCTTVTVGSDGNVPVPMAGGLPRVLYPTEKLAGSKICSSS

SEQ ID NO: 87 - protein, 477 aa, Aspergillus niger
ATPADWRSQSIYFLLTDRFARTDGSTTATCNTADQKYCGGTWQGIIDKLDYIQGMGFTAIWITPVTAQLPQTTAYGDAYHGYWQQDIYSLNENYGTADDLKALSSALHERGMYLMVDVVANHMGYDGAGSSVDYSVFKPFSSQDYFHPFCFIQNYEDQTQVEDCWLGDNTVSLPDLDTTKDVVKNEWYDWVGSLVSNYSIDGLRIDTVKHVQKDFWPGYNKAAGVYCIGEVLDGDPAYTCPYQNVMDGVLNYPIYYPLLNAFKSTSGSMDDLYNMINTVKSDCPDSTLLGTFVENHDNPRFASYTNDIALAKNVAAFIILNDGIPIIYAGQEQHYAGGNDPANREATWLSGYPTDSELYKLIASRNAIRNYAISKDTGFVTYKNWPIYKDDTTIPMRKGTDGSQIVTILSNKGASGDSYTLSLSGAGYTAGQQLTEVIGCTTVTVGSDGNVPVPMAGGLPRVLYPTEKLAGSKICYG

SEQ ID NO: 88 - protein, 431 aa, Streptomyces avermitilis
SPPGTKDVTAVLFEWKFDSVARECTNTLGPAGYGYVQVSPPAEHIQGSQWWTSYQPVSYKIAGRLGDATAFQNMINTCHTAGVKVVVDTVVNHMSAGSGTGTGGSAYTKYNYPGLYSSYDMDDCTATITDYTNRANVQNCELVGLADLDTGEEYVRKTIAGYMNTLLGYGADGFRVDAVKHIPAADLANIKSRLTNPSVYWKQEVIYASGEAVQPTEYTGNGDVQEFRYAYDLKRVFNNENLAYLKNYGEGWGYLNSSVAGVFVDNHDTERNGSTLNYKDGANYTLANVFMLAYPYGAPDINSGYEWSDADAGPPGGGTVNACWQDGWKCQHAWPEIKAMVAFRNATRGESVTNWWDNGGDAIAFGRGAKGYVAINHESGSLTRTYQTSLTAGTYCNVQNNTGVTVDSSGRFTATLGANTALALYSGKSTC

SEQ ID NO: 89 - protein, 643 aa, Clostridium phytofermentans
MYTLKSKLRDLYRHPVGYDVINKILLQAGLSKGLIENPVIGALPLSFLNRIAGKKLGNGFFDALLALLNQSNDRLDPYSSKDKKITPTWWKEAVFYQIYPRSFMDGNGDGVGDLPGIISKLDYLKELGVDALWLSPIYDSPGDDNGYDIRDYQKIDSQFGTMEDFDLLLTELHARNMRLVMDLVVNHTSDEHHWFKEALKSSESTYRDYYFLRKEPNNWTSFFSGSAWNHYPEEDLWGLHLFSKKQMDLNWENPKLRQDIYQMIRWWLEKGVDGFRLDVINYISKETGLPDGDSFIGNLMGFTGIEHYFYGPKLHNHLQEIQKEAFTPYQAFSVGETPGIGMKMGKLLTDDSRGELNMMFSFDHLETSGHARFDQYEYDLNYYKSYIMDWMENFADTSWMSLFYDNHDNPRMLSKVDHTHTHRQELAKMLAMIQMTLKGTPFLYQGQELGMINKDFHEISNFRDVESINKYKELCEKMPKEEAFLQILAGSRDHARTPMQWSAKPGCGFSNAVPWIDSDGDELVCNAEIQMQDSESVLSFYRDLIALRRKTPALIYGDIEFTHKKRKDILIYTRYLEGETYLIICNLSNDEQKLPGNVPVSESLEGLESLSASADERKGLVLCNYPAKVMKSLRAYEGRVYRI

SEQ ID NO: 90 - protein, 1016 aa, Clostridium phytofermentans
ATDTITIHYHRDDGDYEKWNLWLWAEGKDGAAYYFDGEDAFGPYVSVSLDKSADRIGFIVRTDSWEKDVSEDRFIDTSLGDEIWISSGESTFSYEAPEGYEKEVSIESFQLKLNYLRYDEEYTDISFRLTFEDGTTDFLTKEHMRIENGILKAEKEVKYGKKITLDVLKNGLEEDYQGVSFSTAKIDEESKLEMYWMQGTGTISPKADFIKRSKEIESALITSMKEITVKLSVPCRVDDIKQDGFKLSPKLAVSKVEATSTRDSEYKTIKEGYADTFIITMEEPLDMSKKYALSKTDYGSRNLTLDSGLYTSEEFEAAYTYEGNDLGATYSKEKTVFKVWSPSAESISVLFYPHGEAKDGEKPEITYPMKQTGAGVWQAEIEGDLKNKYYVYQVTVDGKTKLVVDPYAKAAGVNGERGMVIDLSETDPDGFREHSSPEFKNPVDAVIYEIHVRDLSMNENSGIENKGKFLGFTETGTTNSAGLSTGLDHMKELGVTHVHLLPSFDYKTIDESKLGENKFNWGYDPQNYNLPEGSYTTDPYQGEVRVREYKEMVQALHENGLHVVMDVVYNHTYTAGDSNFTSLVPGYYYRTDINGNFTNGSGCGNETASERAMVRKFIVDSVVYWATEYKVDGFRFDLMGLHDIETMNMVREALDKIDPSILLYGEGWTGGSTPLPDSKQAIKNNAVELNERIACFSDDIRDAIKGSVFDASDTGFINSGKRNVSNRDESIKFGIVASVSHPQVNLSGVPYSSRFWANEPSQTINYASAHDNLTLWDKLLETNKMASKEELVQMNKLSAAIVLTSQGIPFFQAGEEMARTKKGNDNSYQSPDSINMLNWDNKTEYKDLFEYYKGLIALRKTYDAFRMQTAEEIQQKLEFVDSDSSVIAYRIHDAVKDGREIALIFNGTLEEKEVVLSANAWDVLVNQDTAGTDVIETITGGTIKVPAKSTLVLLENKDAVIKGDKDAVKGDEIQELPTNMQEVAEKESGNAWLWVGIATVCVLAGGVLFWILKRKR

SEQ ID NO: 91 - protein, 554 aa, Clostridium phytofermentans
MKNTNTLHPWWESAAAYQIYPRSFMDSNGDGVGDLQGIISRLPYLSELGFDLIWICPIYPSPNDDNGYDISDYQNIQKEYGTMEDFEELLHKAHERGIRVIMDLVVNHTSSSHPWFIESRSSKDNPKRDWYIWKDGKDNVEPNNWESIFGGSTWEYDEKSGQYFLHVFGKTMPDINWENTQVKKAIFDMICWWLDKGIDGFRVDAISHIKKPDFNDMPNPKNERYVSSFDKHMNQSGILDLLNELKENAFSKYDIFTVAEANGVRIEEIEEWVSSEKGIFNSLFQFDHLNLWNVGSEEGKISIKKLKNALTKWQKAAPMDGNVALVMENHDLVRSISRFGSEDKYWKESAKCLALMYYMQKGVPFIYQGQEIGMLNADYESHLDFRDDPTLFAYQDRINNGMSPAESLQVLKKSSRDNSRTPMQWDASPHAGFTTGTPWMKVNQNYHWLNAEVQKEDEDSILNFYKKLIKIKKETTGLIYGDYKLLMEESESIYAYTREYEEKNYLVVCNLSEELSELQIDLDITKGEILISNYEDRNSKEMLLKPYECRLYSL

SEQ ID NO: 92 - protein, 538 aa, Clostridium phytofermentans
MVKKWWHSSVVYQIYPRSFNDSNGDGIGDLKGIIEKLDYLKNLGIDVIWLSPVFKSPNDDNGYDISDYEDIMDEFGTLEDMELLLKEANNRGIKILMDLVANHTSDEHKWFIESRKSKDNAYRDYYIWRDPVDGHEPNDLGSTFSGSAWEWDEATGQYYLHLFSKKQPDLNWENPIVREEVWKSMNFWIDKGIGGFRMDVIELLGKIPDEKIISNGPMLHEYIREMNRNSFGDKDLLTVGECWGATPEIAKMYSNPDGSELSMVFQFEHIGLDQIPGKDKWDLQPLNLIDLKNVFHKWQTCFHDDGWNSLFWNNHDTPRIVSRWGNDKVYKIESAKMLATLLHGLKGTPYIYQGEELGMANIKFKDINQYKDIETLNMYKDRLNKGYKHEDIMESIYAKGRDNARTPMQWSDEIDGGFTTGTPWIEVNPNFTEINAKEQVSNPNSIYNYYKKLIEIRKNNEVIVYGDFEMLLPEDKNIFAYVRTLKDSKIVVVCNFYENEVEYNIPKEYEEKKEVLISNYGLSLTGRLRPFEAIMYRV

SEQ ID NO: 93 - protein, 555 aa, Clostridium phytofermentans
CKKADVNQNPSELNQDESQKEKEENDDEGTPEVSQDETKAVIPYDYVQNLNIIDDNYRNFYEIFVYSFYDSNGDGIGDINGVISKLDYINDGNDATDSDLGFNGIWLMPIMPSTTYHKYDVTDYYNIDPQYGTLEDFKNLVSECHKRGIHLIIDFVFNHTSAKHPWFLEAVSYLESLKEGEEPDLEKCPYVGYYHFTKDYNGSKTYYKAGTSNWYYEGVFWDQMPDLALENENVRKEIEDIAKYWLDLGVDGFRLDAAKEYFSGEKERNIEVLKWFSDYVKSVKEDADIVAEVWDEEGTIAAYYESGIPSLFNFPLSQHNGLITNTARKLGTSSGKNFAKTLLRLDEKYKEGNPKYIDAPFISNHDTTRISAQCVNDEDQMKMSAGMLLTMNGSPYVYYGEEIGMNSKGTKDENKRLPMQWSATDTTGITTPPANADSVEQKFPPVDEQMKDPLSLYNYYKRAVRIRNENPEIARGDMSVIEELCTKDISAIKKVYQGSEIVILYNINTESANILLKDAGLTELNIRGYLSVDGNAVTMSDGVVSMPKYSIVILK

SEQ ID NO: 94 - protein, 583 aa, Clostridium phytofermentans
MKFEAIYHRTSDNYCYPLNEEDLIINIKTGHDIERVFIYYGDPFEGGILGGNWTWNGVEEELIYKKNLTHHIWWTTTVKPKFKRCKYYFKLVANDTSYYYFEDGFYTEAEMNHQDKNLVYFTFPWMNSIDINKTPDWVNDTVWYQIFPERFNNGDKENDPKNVKAWGFHTVSNDEFYGGDLQGIINRLDYLADIGISGIYLTPIFEANTSHKYDTKDYMKIDPHFGDEKVFKNLVDTAHEKGIRIMLDGVFNHCGNQFAPWLDVLKNGPDSKYFNWFMINKWPFNKEDHNTNDGSFYSFAFTSRMPKLNTNNPEVIKYLLDVVEYWVKNFDIDGIRLDVANEISHRFCKDLRKLTKELKPDFYILGELWHDAITWLHGDEFDGVMNYPLATSLADYWVYPEKTNYDFECAINHNFTMYMQQTNDVLFNLLDSHDTNRLIDKVKDIDIFYQQLAVLFTMPGSPCIYYGTEIAMEGSYDPDCRRCMPWEDIDAGLFKDRIEIIKALIHLRKTNNAFKSRHYHFIEDKNNNRVIHYIKTDEDHKQVEVILNCSKDSIVVQRKGNELFSLLNEDTILKPKGVFIQQI

SEQ ID NO: 95 - protein, 575 aa, Clostridium thermocellum
MKLEAIYHKPYSEFAFPVAPDTLVIRLRTAKNDVNTCILIYHEKYDTSQRGKVKMDKVASDGMFDYYEVELNVGIKRIKYMFYLEDNYSIKWYSSDGFFDYMPQWGHFTYSYICKDDIFHEVEWFRNSTIYQIFPDRFAKFPPDTENSGKRTIHGGNIKGIIDRFDHLVKLGVDVVYLNPIFKSESYHRYDVVDYYEIDPMFGSKEELRELMDLCHKNGIKVIFDGVFNHSGDKFFAFRDVVEKGEKSKYANWYFINSFPVQGYPRPNYECFSFYGGMPKLNTGNPETAKYFLDVVKYWTVEFGVDGWRLDAADEVDRKFWRKLRDMLKDLNKDVVLIGEIFDEASSWLWGDQFDSVINYPLKAMINDLFAYRSIDVETFRNRISGYIMKFNKKVLSSLVNIISTHDTPRFLTLCNGDEKRFEMAVVFQFTFPGVPLIYYGDEIGMEGEGDPDCRRPMIWDEAKWNKKTLELYKFLIGLRKRFDALRTGEYGELPVTGCNGILAYRRGRGENGIIVAMNTLDRKENVVVETGDSFDTVKAFESLKDEERLNVDKKRINICLNPFEWRIYKACGEL

SEQ ID NO: 96 - protein, 655 aa, Thermobifida fusca
MIGRFPILDVSPVVDIGTAKAVVGETFPVRATVFREGHEALGAGVVLYTPEGQRQPLVPLREIAPGTDRYEAEVTVTSEGLWHFAIEAWSDPYATWCHDARIKIPAGQDVELMLEEGARLLERAARRVPRRPALAEIAAAMRDGSRSAHERLDLALSDLVRDELAERPLRELVTRSQRFPVMVSRRRALFGSWYEFFPRSEGAVLDTEDGEPRSGTFATAARRLPAIADMGFDVVYIPPIHPVGYSFRKGRNNSTVAQPGDPGSVWAIGSHEGGHDAIHPDLGTIDDFDAFVARARELGLEIAMDLALQASPDHPWVKEHPEWFTVRADGSIAYAENPPKKYQDIYPINFDKDPEGIFTEVRRIVRYWMSHGVRIFRVDNPHTKPVAFWERLLADIAATDPDVIFLSEAFTRPAMMHTLAKIGFHQSYTYFTWRNTKQELEEYLTELTGEAAAYMRPNFFVNTPDILHAYLQHGGRPAFEVRAILAATLSPTWGMYSGYELCENRALKPGSEEYLDSEKYQYKPRDWEAAEAAGITITPLIRKLNSLRRSHPALQELRNLRFHYADQPEIICYSKRLAGANHGADDTILVVANLDPHHTREATVWLDMPALGFAPGDHITVTDQLSGHSYHWVEANYVRLDPHVQTAHIFTVAPA

SEQ ID NO: 97 - protein, 572 aa, Thermobifida fusca
APSGNRDVIVHLFQWRWKSIADECRTTLGPHGFGAVQVSPPQEHVVLPAEDYPWWQDYQPVSYKLDQTRRGSRADFIDMVNTCREAGVKIYVDAVINHMTGTGSAGAGPGSAGSSYSKYDYPGIYQSQDFNDCRRDITNWNDKWEVQHCELVGLADLKTSSPYVQDRIAAYLNELIDLGVAGFRIDAAKHIPEGDLQAILSRLKNVHPAWGGGKPYIFQEVIADSTISTGSYTHLGSVTEFQYHRDISHAFANGNIAHLTGLGSGLTPSDKAVVFVVNHDTQRYEPILTHTDGARYDLAQKFMLAHPYGTPKVMSSYTWSGDDKAGPPMHSDGTTRPTDCSADRWLCEHRAVAGMVGFHNAVAGQGIGSAVTDGNGRLAFARGSAGYAAFNATNTAWTRTFTTSLPDGVYCDVANGTFVDGVCDGPSYQVSGGKFTATVPANGAVALHVEAPGSCGPDGCGTPPGGGDDCTTVTARFHATVTTWYGQEVAVVGSIPELGSWQPAQGVRLRTDSGTYPVWSGAVDLPAGVGFEYKYVKLNPDGTVEWEQGGNRIATVDDSGGGCSQNFYDSWR

SEQ ID NO: 98 - protein, 825 aa, Anaerocellum thermophilum
MLVRAYIDDFNEIVVVLSQMVHSVKKEDFKVFLNEEEIDIEKIDKIIPHSDNPAEAETRGYEICEQKGKIRFVLKEGHFDYHRKPYKKPVFVIGEMNDWQISPEWEMTYSKLRGRYELIKDLKEIKIGQKFKFAEGASQKLWYPPGFGNDIVITEYFDRETAFTNMIRIIPSNRLLPNLKYKVVYKSEHIWARPREILTRPEFFYPGELGIKYEPYGTYFKLWAPTAYKVKVKVFDESENFRFEKEMARSENGTWNIYLTGDLKNHYYLYEVWHYNYDEDEGFIVYEVPDPYSKASSSNSQKSFIFDPADTLIEGWQQDEFVKTIEKQQDAIIYEMHVRDFTIDKNSGVDEKFRGKFLGLCQKSFYKEKFSTGLLHLKELGITHIHLLPISDFGSVDDKNPDKKYNWGYDPVLYQCPEYWYSTKSGGIEALKELKTMIKTLHQNGIGVVMDVVFNHTYHTKGGKFSIFDKIVPGYFYRIDDYGDYSNATGCGNEIATEKPMVRKFILDTIIYWTEDFHIDGFRFDLMGLIDTLTMRMIAKEVRKRNPYALIYGEGWVMGDSMCLLEERATIESTAHHGYSIGLFNDRIRDSIRGDLDGFKTGYMHGNLSDIERLKQGIRAAIDDFAKEPDECVNYVSCHDNLTLFDKAQKTMVGEDIFWIDRVCRLANAIILTSQGIPFLHGGVEFNRSKGGHPNTYNAGDNINKIDWSLKEKFYDTFKFYCDLIKLRKEHVAFRMRSSGEIRKYLKFLPAPDGIVAFLISYPYDAWKKIIVAYNPFKEKKVITLPEGVWKIKANDGIIFSEENELEAIGSFEISPVSLFIAYQK

SEQ ID NO: 99 - protein, 1104 aa, Anaerocellum thermophilum
DEKTTLIIHYYRYNEDYQGWNLWIWPVEPVGAEGKAYEFTSKDDFGVKAVVELPGKVTKVGIIVRKGNWEAKDVAVDRFISGISGSKEVWLIEGEEQIYTSQPQKTPKMTAFIDGLNTIVVKLAKKADILSNNRTQGFKVTAFYEEVPIKKVEPVLPKINKNFKPEEAGYELIDGGTKVKFILKPGAGDFKFTDTSGKLDVYVSGTMNDWGGTASSEGKYKPLPAWKMTWNAEKGYYELVKELGKDGVVIGAKFKFTSWDGTSAKWYPDGMGNDKVIEELYTGNEKITKVDTFKITTEDELEPQVPYVVSKDSFKPTVAQARNILDNPKYYYKGNDLGCTYTKAYSAFRLWAPTAIGVILRLYDDYKTTKYKEYEMQQSFNGTWYLKINGDLKGKYYQYEVWHASNSITDDTIRKYVVPDPYSRATSANSERTLIFDPKDTNPVGWEKDTFVTLKNQEDAIIYETHVRDFTIDASSGVRPEFRGKYLGFTQTGAKGPNGVKTGIDHLKELGITHVHLLPTYDFGSIDETNPDKGYNWGYDPVLYQNVEGSYATNPNTIVRIKEYKQMVMALHKAGIGIIQDVVFNHTFQIGDAKFSIFDKIVPGYFYRKDKDGNYSNASGCGNEIATEKPMVRKFIIDTLTYLTKEYHIDGFRFDLMAAIDRVTMAKAQEEVRKINPSAVIYGEGWLAGSTPLDSSLRMEIGSFNQAGLHIGLFNDRIREAIRGNLDNESKGFMQGNYSFRLEDLKRGIQGGLGDFAADPDECINYVSAHDNLTLWDKLQKSVPNEPDYIKDKMGRLANAIVLTAQGVPFLHGGVEFNRTKYMNHNSYNAGDKINKYNWNLKVKWYNTFKYYQGLIALRKAHPAFRMTTAEDIQKYLTFIQTPKGTLGFRLTYPKDTWNDIIVVYNSTKKVQEVTLPEGNWVVVANGDEVGTTPIKNLTNFVAGKALVAPISMFVAYKSNEFPQGFTKVTGKDPVSLESSSTVTVPKVYGNGNIEVTFKVKVPHGTDDDVIYLAGSFGKAGLSDWNPGDKDGAIELVRLQDGTYTVTVKLNAGETFEYKYTRGSWTTVEKGANKEEIENRKLTVKDEGGGKMIVSDTVLNWADK

SEQ ID NO: 100 - protein, 611 aa, Anaerocellum thermophilum
MRKPHIIEAIIGNTKVLGQLDSNGILQRFYWPAVDYYQQLKLFLAAVFLDGLVFFEDENFKIKSGFVDDFVYFFEYKIADKTIFQLDFVDFETDSLVRLWETGFEDFYVFLEPMINSSSLFNAAKVDKENEIVYAYFKGTYIGLAFENKIKSFTVKNGIDDANDNQLEGWNEATNPQIAVKLKNTGKVVCFLAFGNSKDEIYQKLSYLKQKGYDEVYRQNKAFWEKKFSKVKLICTQDPKDMQLQKRSAYVFYVLQNSKTGGILAASEVDEKFFHCGGYGFVWGRDAAFIVSAMDELGLSREVEKFFGFKFSCQEKEGFWDQRYYTDGSLAPSWGIQIDETASVVWGFLEHCEKQNSLHLIDLHKEQLKKALLFLIAAVDSEKGVIFRSFDLWEEREGIHLYSNASIYAALKKAKKYFPELESEIEKKLKAIKNQMATRFYSPKLSRYVRSTDVRIPHEEFLKLPEENRYMQKDERYEITYYFKKQDEVVDISMLGIYYPFEMVDSSDKAFKATILAIERECQNSIVGGYKRYSDDRYIGGNPWILTTLWLAIYYKKTGQIDRAEKLFEWAKAHSLPNGLFPEQVDRITGKPAWVVPLAWSHAMYVLYLYE

SEQ ID NO: 101 - protein, 529 aa, Streptomyces avermitilis
MTSFRPAPAWLADAVFYQIYPQSFADSDGDGIGDFNGIVQRLDHLVWLGVTAVWLNPCFVSPFRDAGYDVSDYLNVAPRYGSADDLAELVDEAGRRGIRVLLDLVAGHTSDEHPWFTASANDPDDHRYIWAPEGRPDGFVTSPGTRPGAYLPNFFDTQPALNFGYGRKNPAEPWRQPVDAAGPRANREALRTIMDHWLGLGLAGFRVDMAASLVKDDPGRTETARIWTELRHWLDTAHPDAVLLSEWGEPEVSVPAGFHTDFFLQFGGATDGLPLRSLWSNGDGTVNEAWDPLDCFFDASGKGSPRPFVEAWRKASDAVGATGFVSLPTANHDFSRLNCGPRTAEQLPAAFAFQLTWPTLPAIYYGDEIGMRYVGGLPDKEGSVLGPRYNRAGSRTPMQWDDGPGAGFSTAPADRLYLPLDPSPDRPTVAAQRADDGSLLHLVRRLVALRASTPALGSGGSVEVLHTGYPFVYVRGGRYLVVVNPQRNEVRCPYDATREARALEASGVRVGNGTIEAEGFSYGVFDLGR

SEQ ID NO: 102 - protein, 431 aa, Streptomyces avermitilis; identical to SEQ ID NO: 88

SEQ ID NO: 103 - protein, 503 aa, Saccharomycopsis fibuligera
LPLQEGPLNKRAYPSFEAYSNYKVDRTDLETFLDKQKDVSLYYLLQNIAYPEGQFNDGVPGTVIASPSTSNPDYYYQWTRDSAITFLTVLSELEDNNFNTTLAKAVEYYINTSYNLQRTSNPSGSFDDENHKGLGEPKFNTDGSAYTGAWGRPQNDGPALRAYAISRYLNDVNSLNKGKLVLTDSGDINFSSTEDIYKNIIKPDLEYVIGYWDSTGFDLWEENQGRHFFTSLVQQKALAYAVDIAKSFDDGDFANTLSSTASTLESYLSGSDGGFVNTDVNHIVENPDLLQQNSRQGLDSATYIGPLLTHDIGESSSTPFDVDNEYVLQSYYLLLEDNKDRYSVNSAYSAGAAIGRYPEDVYNGDGSSEGNPWFLATAYAAQVPYKLVYDAKSASNDITINKINYDFFNKYIVDLSTINSGYQSSDSVTIKSGSDEFNTVADNLVTFGDSFLQVILDHINDDGSLNEQLNRNTGYSTSAYSLTWSSGALLEAIRLRNKVKALA

SEQ ID NO: 104 - protein, 497 aa, Saccharomycopsis fibuligera
VPVELDKRNTGHFQAYSGYTVARSNFTQWIHEQPAVSWYYLLQNIDYPEGQFKSAKPGVVVASPSTSEPDYFYQWTRDTAITFLSLIAEVEDHSFSNTTLAKVVEYYISNTYTLQRVSNPSGNFDSPNHDGLGEPKFNVDDTAYTASWGRPQNDGPALRAYAISRYLNAVAKHNNGKLLLAGQNGIPYSSASDIYWKIIKPDLQHVSTHWSTSGFDLWEENQGTHFFTALVQLKALSYGIPLSKTYNDPGFTSWLEKQKDALNSYINSSGFVNSGKKHIVESPQLSSRGGLDSATYIAALITHDIGDDDTYTPFNVDNSYVLNSLYYLLVDNKNRYKINGNYKAGAAVGRYPEDVYNGVGTSEGNPWQLATAYAGQTFYTLAYNSLKNKKNLVIEKLNYDLYNSFIADLSKIDSSYASKDSLTLTYGSDNYKNVIKSLLQFGDSFLKVLLDHIDDNGQLTEEINRYTGFQAGAVSLTWSSGSLLSANRARNKLIELL

SEQ ID NO: 105 - protein, 747 aa, Saccharomyces cerevisiae
FPTALVPRGSSSSNITSSGPSSTPFSSATESFSTGTTVTPSSSKYPGSKTETSVSSTTETTIVPTTTTTSVITPSTTTITTTVCSTGTNSAGETTSGCSPKTITTTVPCSTSPSETASESTTTSPTTPVTTVVSTTVVTTEYASTSTKQGGEITTTFVTKNIPTTYLTTIAPTSSVTTVTNFTPTTITTTVCSTGTNSAGETTSGCSPKTVTTTVPCSTGTGEYTTEATAPVTTAVTTTVVTTESSTGTNSAGKTTTSYTTKSVPTTYVFDFGKGILDQSCGGVFSNNGSSQVQLRDVVLMNGTVVYDSNGAWDSSPLEEWLQRQKKVSIERIFENIGPSAVYPSILPGVVIASPSQTHPDYFYQWIRDSALTINSIVSHSADPAIETLLQYLNVSFHLQRTNNTLGAGIGYTNDTVALGDPKWNVDNTAFTEPWGRPQNDGPALRSIAILKIIDYIKQSGTDLGAKYPFQSTADIFDDIVRWDLRFIIDHWNSSGFDLWEEVNGMHFFTLLVQLSAVDRSLSYFNASERSSPFVEELRQTRRDISKFLVDPANGFINGKYNYIVETPMIADTLRSGLDISTLLAANTVHDAPSASHLPFDIDDPAVLNTLHHLMLHMRSIYPINDSSKNATGIALGRYPEDVYDGYGVGEGNPWVLATCAASTTLYQLIYRHISEQHDLVVPMNNDCSNAFWSELVFSNLTTLGNDEGYLILEFNTPAFNQTIQKIFQLADSFLVKLKATWEQTGN

SEQ ID NO: 106 - protein, 621 aa, Aspergillus niger
NVISKRATWDSWLSNEATVARTAILNNIGADGAWVSGADSGIVVASPSTDNPDYFYTWTRDSGLVLKTLVDLFRNGDTSLLSTIENYISAQAIVQGISNPSGDLSSGAGLGEPKFNVDETAYTGSWGRPQRDGPALRATAMIGFGQWLLDNGYTSTATDIVWPLVRNDLSYVAQYWNQTGYDLWEVNGSSFFTIAVQHRALVEGSAFATAVGSSCSWCDSQAPEILCYLQSFWTGSFILANFDSSRSAKDANTLLLGSIHTFDPEAACDDSTFQPCSPRALANHKEVVDSFRSIYTLNDGLSDSEAVAVGRYPEDTYYNGNPWFLCTLAAAEQLYDALYQWDKQGSLEVTDVSLDFFKALYSDATGTYSSSSSTYSSIVDAVKTFADGFVSIVETHAASNGSMSEQYDKSDGEQLSARDLTWSYAALLTANNRRNVVPSASWGETSASSVPGTCAATSAIGTYSSVTVTSWPSIVATGGTTTTATPTGSGSVTSTSKTTATASKTSTSTSSTSCTTPTAVAVTFDLTATTTYGENIYLVGSISQLGDWETSDGIALSADKYTSSDPLWYVTVTLPAGESFEYKFIRIESDDSVEWESDPNREYTVPQACGTSTATVTDTWR

SEQ ID NO: 107 - protein, 593 aa, Aspergillus oryzae
VQPVLRQATGLDTWLSTEANFSRQAILNNIGADGQSAQGASPGVVIASPSKSDPDYFYTWTRDSGLVMKTLVDLFRGGDADLLPIIEEFISSQARIQGISNPSGALSSGGLGEPKFNVDETAFTGAWGRPQRDGPALRATAMISFGEWLVENSHTSIATDLVWPVVRNDLSYVAQYWSQSGFDLWEEVQGTSFFTVAVSHRALVEGSSFAKTVGSSCPYCDSQAPQVRCYLQSFWTGSYIQANFGGGRSGKDINTVLGSIHTFDPQATCDDATFQPCSARALANHKVVTDSFRSIYAINSGRAENQAVAVGRYPEDSYYNGNPWFLTTLAAAEQLYDALYQWDKIGSLAITDVSLPFFKALYSSAATGTYASSTTVYKDIVSAVKAYADGYVQIVQTYAASTGSMAEQYTKTDGSQTSARDLTWSYAALLTANNRRNAVVPAPWGETAATSIPSACSTTSASGTYSSVVITSWPTISGYPGAPDSPCQVPTTVSVTFAVKATTVYGESIKIVGSISQLGSWNPSSATALNADSYTTDNPLWTGTINLPAGQSFEYKFIRVQNGAVTWESDPNRKYTVPSTCGVKSAVQSDVWR

SEQ ID NO: 108 - protein, 579 aa, Rhizopus oryzae
ASIPSSASVQLDSYNYDGSTFSGKIYVKNIAYSKKVTVIYADGSDNWNNNGNTIAASYSAPISGSNYEYWTFSASINGIKEFYIKYEVSGKTYYDNNNSANYQVSTSKPTTTTATATTTTAPSTSTTTPPSRSEPATFPTGNSTISSWIKKQEGISRFAMLRNINPPGSATGFIAASLSTAGPDYYYAWTRDAALTSNVIVYEYNTTLSGNKTILNVLKDYVTFSVKTQSTSTVCNCLGEPKFNPDASGYTGAWGRPQNDGPAERATTFILFADSYLTQTKDASYVTGTLKPAIFKDLDYVVNVWSNGCFDLWEEVNGVHFYTLMVMRKGLLLGADFAKRNGDSTRASTYSSTASTIANKISSFWVSSNNWIQVSQSVTGGVSKKGLDVSTLLAANLGSVDDGFFTPGSEKILATAVAVEDSFASLYPINKNLPSYLGNSIGRYPEDTYNGNGNSQGNSWFLAVTGYAELYYRAIKEWIGNGGVTVSSISLPFFKKFDSSATSGKKYTVGTSDFNNLAQNIALAADRFLSTVQLHAHNNGSLAEEFDRTTGLSTGARDLTWSHASLITASYAKAGAPAA

SEQ ID NO: 109 - protein, 644 aa, Clostridium thermocellum
MANTYFNDAIIGNSGMLVCLTRNGELTRLFWPNIDYPQHFEKMATGIFYTGQKNSTSWFYEDNWHHTQYYVEDTNILKTICEDGGRGLRVEQTDFVLKDRDVMVRRYVIENIGPNEVDLGFVQYSSTVSTTPELRSTLFDFNVDALIHYRHNYYISISSDSEVVQFQLGNNAFDCARYTELYGYDSIGMMKDGAMSFNIGKIEPGGKKTFNLFICASHTLKGVKELVRWCRKMNVDEEYEKTRKYWLDFLKNARLIVTGDKNIDNLYKRSILVFKLMSDERTGGLLASAEIDEGFTRCGRYAYCWGRDAAFITGALDTAGLTEAVDKFYQWAVMTQDDDGSWQQRYHMDGNLAPSWGLQIDETGTLIWGMLKHYEVTKNIDFLKSMWESIKKGVEFLTRFIDSDTGLPAPSYDLWEERVGEHTYSSAAVYAGIKAGAEAARILGASEELIEKWEKAASDMKASIEKNFWRDEAGRFIRSVRTKLNPWGSEHSPYTTVIKVNEKGYFRDVTLEDWTIDVSLLGVSIPFGVFDVHDERVKKTVEAIERALTSHPVGGIKRYENDNYIGGNPWVLATLWVALYYIEIKEYEKAKDYLRWATKSCTALGLLPEQVSKDNGEPCWVIPLTWSHAMYVLVLAGLKEAGVL

SEQ ID NO: 110 - protein, 644 aa, Clostridium thermocellum
MQKSYYNNAITGNSSMLACFSERAELLRLFWPDIDYIQNLDKMFLGLFEKNKTGSTVWLNDIRCEHHQEYLPDSNIIKNMVTNFFDGYKVVLYDFVHPEMDVLVRRFEIENLRGESRELGLMSFSAATSSDSEVACSLFDFMNEALVHYKPDSYIAVTSDIPVYQFQIGNNANDAAVNTYLYGKDDIGMMKDAAISWDLGVFQPHAVKTTNVYLCAADTLKSCKALVRRVKTVGGLTAFRETGRYWKDYLEKTTKLKSGNTLLDDLYKRSLLVFRLMYSKKSGGLMAAPEVDEYFTKCGKYAYCWGRDAAFITGALDIGGLCESVDHFYKWAVNVQDEDGSWQQRYHMNGNLGPCWGLQVDETGTIIWGMLNHYNYTKNTDFLKSVWDSVKAAADFLVRFIDSETGLPRPSFDLWEERYGEHAYSSASVCAGLKSASEMARILGKPSQEYIQWETTADSIKKAIVKYFWKEDYRRFIRSIRVKLNGFGQEPSSDTMLIKVNPKGYVRDVTKEDWIVDVSLVGLGIPFEIFELNDPMLRDTVSLIEQVLTAQGVGGIKRYENDTYIGGNPWILTTLWIALYHAKSGNYKKAKEYLIWAASGKTELGLLPEQINRDTGKPEWIIPLTWSHAMYVHVYSELINAGVL

SEQ ID NO: 111 - protein, 608 aa, Arxula adeninivorans
DSCHTFTLANSPPDDKAVALSSYSYCGGYLSASAFVKNLSYDKLVTLYWTNADNKSTPLNAGSLDYVKAASDDQSWELWSLNVTTVPDGVDALLNITYVAASIGKTNSQQLNVQVEATGDPIPTPQIPTIYKPYASPSDFSDDITNWLKPSNDSQTGIAKSFLFNNINIPGAAPGTVIAAQSYSEPDYAYTWVRDASLVMDVVNRLYSSAKSEEKRQLYEKILFQYAKAGAQEQNDPTAISGMGEPKFYLNNTAFTGSWGRPQNDGPATRAITLIEFANAYLANGGSQDTVREQLYDSDKYPQVAPIKKDLQFVASNWSSPSFDLWEEEESAHFYTRLVQRKALLLGADFANDMGDHELSDKLKTQASKLSDTLPEFWDSARQLILYEYGPVLRGKYSYKDISVVLGVMHGYANDNVFSYTNDQILATAYQVSTSFLDVYKVANTTSDESGKPLGIPVGRYPEDVYDGVGTSQGNPWYLTTMAMAEFLYRSVQEFEDAGSIIISDTSLPFWKYFASSVDHKAGAKYNKNDQSFKTSLKSLTGWGDAFMRRAKYHTPSSGHMSEEFNRTTGEPRGAKDLTWSYASLLSAAFAREELRNQKNYLTNVADL

SEQ ID NO: 112 - protein, 595 aa, Hormoconis resinae
APTELKARDLSSFIASERAIALQGALNNIGPDGSAVPGAGAGFVVASPSKANPDYFYTWSRDSALTLKMIIDEFILGNTTLQTIIEQYIHAQAVLQTVSNPSGTFLPDGVGLGEPKFMVDGTRFNGPWGRPQRDGPALRAIALMTYSNWLIKNGQFAEAKTKIWPIIANDLSYVGQYWNQSGFDLWEETYASSFFTIQNQHRALVEGAQLAHDLGVTCTGCDQAPEVLCFLQSFWNGKYIVSNINVNNGRTGLDGNSILGAISTFDIDAYCDSPTLQPCHSQSLANFKVLTDTFRNLYTINAGIPEGQGVAVGRYAEDVYMGGNPWYLITTAAAEFLYDAVAQWKARHVLTVDETSLAFFKDIYPEVTVREYKSGNANSPFAQIMDAVTAYADSYVAIAEKYIPSNGSLSEQFNRDTGTPLSAIDLTWSYAAFITMSQRRAGQYPSSWGSRNALPPPTTCSASSTPGIYTPATAAGAPNVTSSCQVSITFNINATTYYGENLYVIGNSSDLGAWNIADAYPLSASAYTQDRPLWSAAIPLNAGEVISYQYVRQEDCDQPYIYETVNRTLTVPACGGAAVTTDDAWMGPVGSSGNC

SEQ ID NO: 113 - protein, 601 aa, Aureobasidium pullulans
LPSPESIQERATGSLSSWLSSENTVALQGVLNNIGASGSKASGASAGVVVASPSKSNPDYFYTWTRDSALVFKALVDQLIAGNKSLEPLIQQYISAQAKLQTVNNPSGGLCSGGLAEPKFEVDLTPFTGAWGRPQRDGPALRATAMIAYSRYLIANGNTTTVNNIIWPIVQNDLSYVTQYWNQTTFDLWEEINSSSFFTTAVQYRALVEGNNLATQLGKSCPNCVSQAPLVLCFLQSYWTGSYALSNTGGGRSGKDANSILTSIHIFDPAASCDSTTFQPCSDKALANHKVVTDSFRSIYSINQGIAQGSGVAVGRYPEDSYYNGNPWYLNTFAAAEQLYDAVYQWKKIGSISITSISLPFFKDVYSSAAVGTYSSSTVTFTSIVNAVQTYADSYMSIAQKYTPSNGALSEQYNRADGTPLSAVDLTWSYAAFLTAYNARANVLPASWGASSAKLPNSCSSGSATGPCAAATNTNWGNPGSPSTGTPTTTTGGSCTTPTSIAVTFNEQKTTSYGENIYIVGSIPALGNWNTANAVALSASKYTSSNPLWTVTINFATGTSFNYKYIKKAQDGSVTWESDPNRSYTVTGNCAGTATENDSWR

SEQ ID NO: 114 - protein, 718 aa, Bacillus subtilis
MVSIRRSFEAYVDDMNIITVLIPAEQKEIMTPPFRLETEITDFPLAVREEYSLEAKYKYVCVSDHPVTFGKIHCVRASSGHKTDLQIGAVIRTAAFDDEFYYDGELGAVYTADHTVFKVWAPAATSAAVKLSHPNKSGRTFQMTRLEKGVYAVTVTGDLHGYEYLFCICNNSEWMETVDQYAKAVTVNGEKGVVLRPDQMKWTAPLKPFSHPVDAVIYETHLRDFSIHENSGMINKGKYLALTETDTQTANGSSSGLAYVKELGVTHVELLPVNDFAGVDEEKPLDAYNWGYNPLHFFAPEGSYASNPHDPQTRKTELKQMINTLHQHGLRVILDVVFNHVYKRENSPFEKTVPGYFFRHDECGMPSNGTGVGNDIASERRMARKFIADCVVYWLEEYNVDGFRFDLLGILDIDTVLYMKEKATKAKPGILLFGEGWDLATPLPHEQKAALANAPRMPGIGFFNDMFRDAVKGNTFHLKATGFALGNGESAQAVMHGIAGSSGWKALAPIVPEPSQSINYVESHDNHTFWDKMSFALPQENDSRKRSRQRLAAAIILLAQGVPFIHSGQEFFRTKQGVENSYQSSDSINQLDWDRRETFKEDVHYIRRLISLRKAHPAFRLRSAADIQRHLECLTLKEHLIAYRLYDLDEVDEWKDIIVIHHASPDSVEWRLPNDIPYRLLCDPSGFQEDPTEIKKTVAVNGIGTVILYLASDLKSFA

SEQ ID NO: 115 - protein, 710 aa, Bacillus licheniformis
MPGISRPFEAYLDEMRTITVLVPKSRASSCSPPFLLEDDQGERIELSVKAQVELEEQFKYVLESSCTVPFGRVHKVCCEESVWTDLQIGSVTRSAAFDKAFFYDGRLGAFYSKGSTLFKVWAPTASAAAIKLEDPDSLQTNTFQMMRRKKGVFEVTVEGDLNGWSYLYELYVNGKPLLTVDPYAKAVTANGEKGVVLDPEEVKVEKHRAPRLHSPCDAVIYEVHIRDFSIHEDSGMRHKGKYVAFTEDGTETSGGFSTGIAYLKELGVTHIEVLPFHDFAGVDELSPDQSYNWGYNPLHFNAPEGSYSLDPQNPKCRITELKTMIQSLHKHGFSVIMDAVYNHVYKRETSPFEKTVPGYFFRHNEYGFPSDGTGVGNDIASERLMVRKYILDSVRYWLEEYDVDGIRFDLMGILDIETVRQISTLAENVKPGVPLFGEGWDLNTPLDSGQKATLQNAGKVPAVGFFNDRFRNAVKGSTFELSDRGYALGDTGKKAALQHGIAGSPGFLQPAQSINYVECHDNHTFWDKMALCFEEDADTKRLRQRLAVSIVLLSQGVPFLHAGQEFCRTKNGDSNSYRSGDDINKLDWEKRAELCEDVEYVRQLIRLRRSHPAFRLQKEEEVKEHLSFMDGTGEVTAYKLKNIAAIDPWNEIIVVHCPFAKKETLKLPDQKQYLLHCDPFTFFNGKVQAEKRLRLNGIGTYVLYEPKGIF

SEQ ID NO: 116 - protein, 918 aa, Oryza sativa
MAVGEECAAAVASQGFVSDARAYWVTRSLIAWNVNDQDTSLFLYASRDATMHVSDGAIHGYDSKIELEPEHASLPDNVAEKFPFIRSYRTFRVPSSVDVTSLVKCQLAVASYDAHGRHQDVTGLQLPGVLDDMFAYTGPLGAVFSDKDVDLYLWAPTAQDVRVCFYDGPAGPLLQTVQLKELNGVWSVTVPRYRENQYYLYEVKVYHPSTSQVEKCLADDPYARGLSANGTRTWLVDINSETLKPASWDELSDEKPNLESFSDISIYELHIRDFSAHDSTVDCNSRGGFRAFTFQDSAGIRHLRKLSAAGLTHVHLLPSFHFASVDDNKSNWKFVDEAQLAKLPPGSDEQQAAIVSIQQEDPYNWGYDPVLWGVPKGSYASNPDGPSRIIEYRQMVQALNRIGLRVVMDVVYNHLDSSGPFGVSSVLDKIVPGYYLRRNVNGQIENSAAMNNTASEHFMVDRLIVDDLLNWAINYKVDGFRFDLMGHIMKSTMFTVMSICTISTIIKIKDVFADTLIRAKSAIRSLTRDVHGVDGSKIYLYGEGWDFGEVAQNKRGINASQINMSGTGIGSFNDRIRDSVNGGNPFGNPLQQGFSTGLFLEPNGYYQGNEADTRRELATYADHIQIGLAGNLKDYVLRTHTGEAKKGSDIYTFDGSPVGYTSSPVETINYVSAHDNETLFDIVSIKTPIGLSIDEKCRINHLASSMIALSQGIPFFHAGDEILRSKSLDRDSYNSGDWFNKLDFTYETNNWGVGLPPRDKNEENWHLIKPRLENPSFRPLKNHILSVFDNFVDILKIRYSSPLFRLSTASDIEQRVRFHNTGPSMVPGVIVMSIKDAQNEKCKMAQLDKNFSYVVTIFNVCPHEVSIEIHDLASLGLELHPIQVNSSDALVRQSAYEASKGRFTVPRRTTAVFVQPRC

SEQ ID NO: 117 - protein, 963 aa, Triticum aestivum
MPMPMRTMLLRHLSPAPALPNPRRSSASSPQRRPARARPPPLHSARATALRARRTPMAAGETGASVSVSAAEAEAEATQAFMPDARAYWVTSDLIAWNVSEQEAASVYLYASRTAAMGLSPSNGGIQGYDSKVELQPESAGLPETVTQKFPFISSYRAFRVPSSVDVASLVKCQLVIASFGADGKHVDVTGLQLPGVLDDIFAYTGPLGAVFREDSVSLHLWAPTAQDVSVCFFDGPAGPVLETVQLKESNGVWSVTGPREWENRYYLYEVDVYHPTKAQVLKCLAGDPYARGLSANGARTWLVDINNETLKPASWDELADEKPKLDSFSDITIYELHIRDFSAHDGTVDSDSCGGFRAFAYQASAGMQHLRKLSDAGLTHVHLLPSFHFAGVDDIKSNWKFVDECKLATFPPGSDMQQEAVVAIQEEDPYNWGYNPVLWGVPKGSYASDPDGPSRIIEYRQMVQALNRIGLRVVMDVVYNHLDSSGPCGISSVLDKIVPGYYVRRDTNGQIENSAAMNNTASEHFMVDRLIVDDLLNWAVNYKIDGFRFDLMGHIMKHTMMRAKAALQSLTRDAHGVDGSKIYLYGEGWDFAEVARNQRGINGSQLNMSGTGIGSFNDRIRDAVNGGNPFGNPLQQGFNTGLFLEPNGFYQGNEADTRRSLATYADQIQIGLAGNLRDYVLITHTGETKKGSEIHTFDGLPVGYTSSPIEIINYVSAHDNETLFDVISVKTPMNLSVDERCRINHLASSMMALSQGIPFFHAGDEILRSKSIDRDSYNSGDWFNKLDFTYETNNWGVGLPPSEKNEDNWPLMKPRLENPSFKPAKGHILAALDSFVDILKIRYSSPLFRLSTASDIKQRVHFHNTGPSSVPGVIVMGIEDARDEKPEMAQLDANFSYVVTVFNVCPHEVSMDIPALASMRLELHPVQVNSSDALVGKSVYEAATGRFTVPRRTVSVFVEPRC

SEQ ID NO: 118 - protein, 647 aa, Clostridium phytofermentans
MDEFWNSIDGEKQYYYDGNDLGCTYTNRSTKLKVWAPTASMVVVNLYQNGNAGKPYITEIMKKEESGIWSVCLLGDLEGVYYTYLVTVDGQTKEAVDPYARTTGLNGKRAMILDLEKTNPTGFLEDTKPKFDSFLDAVIYELHIRDLSMESDSGIKEKGKLLGLTELNTRNSDGLTTGLSHILDLGVTHIHLLPCFDYASVDEENSSIFNWGYDPENYNVVEGSYSTNPYDGAVRVKEFKTLVQSLHENGLRVIMDVVYNHTMKTEESNFNKIVPDYYYRKVGDKFSDASACGNETASERLMVRKFIVDSIIYWAKEYHIDGFRFDLMGIHDIETMNEVRKVLDQIDPSIILYGEGWVGGDSPLPAGQRAMKANMSMLPGIAAFSDDFRDGLKGSVFLAEEKGFATGDSDKKESVKFGVVASTLHPQIDYKKVNYSDSPWALEPAQCINYVSAHDNYTLWDKIACSCKEDTYEIRVKKNKLCAAIVFTSQGIPFLQAGEEMLRNKPSSEIAGEFVENSYNSSDSVNCIKWSNKANVIDVVSYYEGLIRFRKEHKALRMQSAKEISKRLTFLPEEREDVISYLIQGDLVDKTLCVIYNSSEEKVTIRLPESDWTVYIDGNNSGVEPLYEVKGTTVEVEPISCMVLVKD

SEQ ID NO: 119 - protein, 1764 aa, Streptomyces avermitilis
ATPPAPPSDAKLAAEPARHDATREQFYFVMPDRFANGDTSNDKGGLTGSRLSTGYDPTDKGFYQGGDLKGLTRKLDYIKGLGTTSIWLAPIFKNQPVQGTGKDASAGYHGYWITDFTKVDPHFGTNKDLETLISKAHAKGMKVFFDVITNHTADVVDYEEKSYGYLSKGAFPYLTKDGRPFDDAGYTDGPRKFPAVDGDSFPRTPAVAARKKNAKVPSWLNDPTMYHNRGDSTFAGESSTHGDFSGLDDLWTERPEVVRGMEKIYEKWVRDFGIDGFRIDTVKHVNTEFWTQWATALDAYAKKRGKDDFFMFGEVYSADTSVTSPYVTQGRLDSTLDFPFQDAARSYASQGGSAKKLASVFGDDYKYTTDKANAYEQVTFLGNHDMGRIGYFLNQDNPKATDAELLRKDRLANELMFLSRGNPVVYYGDEQGFTGSGGDKDARQTMFASKVADYLDDDEIGTDRGHASDAYDTSAPLYKEIAALSKLRKDNPALADGIQTERYAADGAGVYAFSRTDARTGTEYVVAVNNADKASAATFATGSADTAFKGIHGTDDVLKSDADKKITVTVPAGAAVVLKAAGRPGTPAAKPSLTLKAPDAGATGTVELSADVDGGRLNRVVFAAQVGNAKWRTLGSADHAPYRVTQTIGKDVPAGTALRYKAVVIDAAGRTASATAASTTGTPPAAETPTASSRDYAIVHYKRPDGDYTDWRLYAWGDLADGESTTWPAGHDFVGRDAYGAFAYVKLKPGASTVNFLVIDKDGDKDVSADRTIDVTKAGEVWVEQGKETVRTERPDYPAQDKTKAVIHYHRADGDLTGWGLHVWTGAATPTDWSKPLEPVRTDAYGAVFEVPLTDGATSLSYIIHKGDEKDLSADRSLDLTADGHEVWLLNGQENHLLPQPAGSAAALDLTTSKAVWIDRNTVAWNGSDAAASTQLLSSRDGSIAVKDGSLTSDDERWLRLSKTSLTDAQKAAFPHLKSYTAWSVDPRDRDRVREALAGQVVASQRAANGAVLAATGVQLAGVLDDLYDATKADLGPTFRGGHPTLAVWAPTAQSVSLELDGAHVRMKRNNATGVWSVTGPASWKGKPYRYVVKVWAPTVRKVVTNKVTDPYSVALTTDSERSLVVDLDDRSLAPSGWSSLKKPKAVPLRDAEIQELHIRDFSVADRTVPAKDRGTYLAFTDKNSDGSRHLRQLAESGTSYVHLLPAFDIATIAEKKSGQQATDCDLASYAADSEKQQECLTAVAAKDAYNWGYDPYHYTVPEGSYATDANGTRRTVEFRRMVKSLNQDGLRVVMDVVYNHTAAAGQAGTSVLDRIVPGYYQRLLADGSVATSTCCANTATENAMMGKLVVDSLVTWAKEYKVDGFRFDLMGHQPKANILAVRKALDALTVAKDGVDGKKIILYGEGWNFGEVADDARFVQATQKNMAGTGIATFSDRARDAVRGGGPFDADPGVQGFGSGLYTDPNSSDANGTPAEQKARLLHYQDLIKVGLSGNLAKYRFTDSSGKEVTGSEVDYNGTGAGYADAPGDALAYADAHDNESLYDALTYKLPKGTPAGDRARMQVLAMATAALAQGPSLSQAGSDLLRSKSLDRNSYDSGDWFNAIHWNCQDGNGFGRGLPMAADNKSKWPYATPLLTSVKVGCDQIEGTSAGYQDLLRIRTTEPDFSLSTAGQVQSKLTFPLSGKDETPGVITMKLGDLVVVFNATPDQQEQTVAALAGKDYALHPVQAAGADPIVKSASYTAKSGMFAVPGRTVAIFSQVAR

SEQ ID NO: 120 - protein, 1079 aa, Klebsiella pneumoniae
SSSSPSGSPGSPGNPGNPGTPGTPDPQDVVVRLPDVAVPGEAAQASANQAVIHLVDIAGITSSTPADYATKNLYLWNNETCDALSAPVADWNDVSTTPTGSDKYGPYWVIPLTKESGCINVIVRDGTNKLIDSDLRVSFGDFTDRTVSVIAGNSAVYDSRADAFRAAFGVALADAHWVDKTTLLWPGGENKPIVRLYYSHSSKVAADSNGEFTDKYVKLTPTTVSQQVSMRFPHLASYPAFKLPDDVNVDELLQGETVAISAESDGILSSATQVQTAGVLDDTYAAAAEALSYGAQLTDSGVTFRVWAPTAQQVELVVYSADKKVVASHPMTRDSASGAWSWQGGSDLKGAFYRYAMTVYHPQSRKVEQYEVTDPYAHSLSTNSEYSQVVDLNDSALKPEGWDGLTMPHAQKTKADLAKMTIHESHIRDLSAWDQTVPAELRGKYLALTAQESNMVQHLKQLSASGVTHIELLPVFDLATVNEFSDKVADIQQPFSRLCEINSAVKSSEFAGYCDSGSTVEEVLTQLKQNDSKDNPQVQALNTLVAQTDSYNWGYDPFHYTVPEGSYATDPEGTARIKEFRTMIQAIKQDLGMNVIMDVVYNHTNAAGPTDRTSVLDKIVPWYYQRLNETTGSVESATCCSDSAPEHRMFAKLIADSLAVWTTDYKIDGFRFDLMGYHPKAQILSAWERIKALNPDIYFFGEGWDSNQSDRFEIASQINLKGTGIGTFSDRLRDAVRGGGPFDSGDALRQNQGVGSGAGVLPNELTSMTDDQARHLADLTRLGMAGNLADFVLIDKDGAVKKGSEIDYNGAPGGYAADPTEVVNYVSKHDNQTLWDMISYKAAQEADLDTRVRMQAVSLATVMLGQGIAFDQQGSELLRSKSFTRDSYDSGDWFNRVDYSLQDNNYNVGMPRSSDDGSNYDIIARVKDAVATPGETELKQMTAFYQELTALRKSSPLFTLGDGATVMQRVDFRNTGADQQTGLLVMTIDDGMQAGASLDSRVDGIVVAINAAPESRTLQDFAGTSLQLSAIQQAAGDRSLASGVQVAADGSVTLPAWSVAVLELPQGESQGAGLPVSSK

SEQ ID NO: 121 - protein, 546 aa, Rhizomucor pusillus
ATSDDWKGKAIYQLLTDRFGRADDSTSNCSNLSNYCGGTYEGITKHLDYISGMGFDAIWISPIPKNSDGGYHGYWATDFYQLNSNFGDESQLKALIQAAHERDMYVMLDVVANHAGPTSNGYSGYTFDDASLYHPKCTIDYNNQTSIEQCWVADELPDIDTENSDNVAILNDIVSGWVGNYSFDGIRIDTVKHIRKDFWTGYAEAAGVFATGEVFNGDPAYVGPYQKYLPSLINYPMYYALNDVFVSKSKGFSRISEMLGSNRNAFEDTSVLTTFVDNHDNPRFLNSQSDKALFKNALTYVLLGEGIPIVYYGSEQGFSGGADPANREVLWTTNYDTSSDLYQFIKTVNSVRMKSNKAVYMDIYVGDNAYAFKHGDALVVLNNYGSGSTNQVSFSVSGKFDSGASLMDIVSNITTTVSSDGTVTFNLKDGLPAIFTSAGATSPGGSSGSVEVTFDVYATTVYGQNIYITGDVSELGNWTPANGVALSSANYPTWSATIALPADTTIQYKYVNIDGSTVIWEDAISNREITTPASGTYTEKDTWDES

SEQ ID NO: 122 - protein, 481 aa, Bacillus licheniformis
VNGTLMQYFEWYTPNDGQHWKRLQNDAEHLSDIGITAVWIPPAYKGTSQADVGYGAYDLYDLGEFHQKGTVRTKYGTKGELQSAIKSLHSRDINVYGDVVINHKGGADATEDVTAVEVDPADRNRVISGEHLIKAWTHFHFPGRGSTYSDFKWYWYHFDGTDWDESRKLNRIYKFQGKTWDWEVSNEFGNYDYLMYADIDYDHPDVVAEIKRWGTWYANELQLDGFRLDAVKHIKFSFLRDWVNHVREKTGKEMFTVAEYWSNDLGALENYLNKTNFNHSVFDVPLHYQFHAASTQGGGYDMRKLLNGTVVSKHPLKSVTFVDNHDTQPGQSLESTVQTWFKPLAYAFILTRESGYPQVFYGDMYGTKGDSQREIPALKHKIEPILKARKQYAYGAQHDYFDHHDIVGWTREGDSSVANSGLAALITDGPGGAKRMYVGRQNAGETWHDITGNRSEPVVINSEGWGEFHVNGGSVSIYVQR

SEQ ID NO: 123 - protein, 484 aa, Aspergillus niger
LSAAEWRTQSIYFLLTDRFGRTDNSTTATCDTGDQIYCGGSWQGIINHLDYIQGMGFTAIWISPITEQLPQDTADGEAYHGYWQQKIYDVNSNFGTADDLKSLSDALHARGMYLMVDVVPNHMGYAGNGNDVDYSVFDPFDSSSYFHPYCLITDWDNLTMVQDCWEGDTIVSLPDLNTTETAVRTIWYDWVADLVSNYSVDGLRIDSVLEVEPDFFPGYQEAAGVYCVGEVDNGNPALDCPYQKVLDGVLNYPIYWQLLYAFESSSGSISNLYNMIKSVASDCSDPTLLGNFIENHDNPRFASYTSDYSQAKNVLSYIFLSDGIPIVYAGEEQHYSGGKVPYNREATWLSGYDTSAELYTWIATTNAIRKLAISADSAYITYANDAFYTDSNTIAMRKGTSGSQVITVLSNKGSSGSSYTLTLSGSGYTSGTKLIEAYTCTSVTVDSSGDIPVPMASGLPRVLLPASVVDSSSLCGGSGRLYVE

SEQ ID NO: 124 - protein, 586 aa, Aspergillus tamarii
ATPADWRSQSIYFLLTDRFARTDGSTTAACNTEDRKYCGGTWQGIIDKLDYIQGMGFTAIWITPVTGQLPQHTAYGDAYHGYWQQDIYSLNENYGTADDLKALSSALHERGMYLMVDVVANHMGYDGAGASVDYSVFKPFNSQEYFHSFCLIQNYEDQTQVENCWLGDNTVSLPDLDTTKDEVKNEWYDWVGTLVSNYSIDGLRVDTVKHVQKDFWPGYNKAAGVYCIGEVLDGDPAYTCPYQDVMDGVLNYPIYYPLLNAFKSTSGSMNDLYNMINTVKSDCPDSTLLGTFVENHDNPRFASYTNDIALAKNVAAFIILNDGIPIIYAGQEQHYAGGNDPANREATWLSGYATDSELYKLIASANAIRSHAISKDTGFVTYKNWPIYKDDTTIAMRKGTDGSQVVTILSNKGASGDSYTLSLGDTGYKAGQQLTEVIGCTTVTVGSDGKVPVPMAGGLPRVLYPTEKLADSKICSSSGATSPGGSSGSVEVTFDVYATTVYGQNIYITGDVSELGNWTPANGVALSSANYPTWSATIALPADTTIQYKYVNIDGSTVIWEDAISNREITTPASGTYTEKDTWDES

SEQ ID NO: 125 - protein, 603 aa, Acidomyces richmondensis
LTPAEWRAQSIYQVLTDRFALTNGSTTAPCNLNEYCGGTWQGIINKLDYIQGMGFTAIWISPVVENIPASDNTADGESYHGYWAQRIYEVNPNFGSAADLEALSEAIHARGMYLMVDIVTNHMGYDGCGTCVDYSVFDPFDNQSYFHPFCLINYNNATSIQVCWEGDNIVSLPDLRTEDSDVLGMWETWITQLVANYSIDGLRVDSMQQVDQAFWQPFMSAAGDLYAVGEVFNGDPTYTCPYQQYLPGVLNYPAYYWITQAFESTSGSIGNLVNGINEMKNDCLDTTLLGSFLENHDNPRFPSYTSDYSLDKNAIAFAMLQDGIPIVYEGQEQHYSGGSVPNNREDIWSSGYSTTSELYTFIKIINAIRTQALTKDSSYLTYKAYPVYSDSQTIAMRKGETYPIISVFTNSGASGSAYSITLSSSDTGFSENQSITELLTCTVSTTDSGGNLVVNISSGLPRVYYPTSAISGSTVCAESTSTLTISSPISTSTSDCTTASSVAVTFDETVTTTYGETIKLSGSISQLGDWNTQDAILLSAADYKSTDNVWFVTINLPAGIVFQYKYINVDSDGDVTWEADPNHTYTVSATCATAATIHDTWQN

SEQ ID NO: 126 - protein, 588 aa, Aspergillus bombycis
ATPADWRSQSIYFLLTDRFARTDGSTTATCNTEDRKYCGGTWQGIIDKLDYIQGMGFTAIWITPVTGQLPQDTAYGEAYHGYWQQDIYALNENHGTADDLKALSSALHERGMYLMVDVVANHMGYDGAGASVDYSVFNPFSSQDYFHSFCLIENYDDQTQSENCWLGDNSVSLPDLDTTKDEVKNEWYEWVGNLVSNYSIDGLRVDTVKHVQKDFWPGYNEAAGVYCIGEVLNGDPAYTCPYQDVMDGVLNYPIYYPLLNAFKSTSGSMNDLYNMINTVKSDCPDSTLLGTFVENHDNPRFASYTNDIALAKNVAAFIILNDGIPIIYAGQEQHYAGGNDPANREATWLSGYSTDSEIYKLIASANAIRNHAVSTDTGFVTYKNWPIYKDDTTIAMRKGTDGSQIVTILSNKGASGDAYTLSLGNTGYTAGQQLTEVIGCTTLTVGSDGNVPVPMAGGLPRVLYPTEKLGDSKICSSSGRGATSPGGSSGSVEVTFDVYATTVYGQNIYITGDVSELGNWTPANGVALSSANYPTWSATIALPADTTIQYKYVNIDGSTVIWEDAISNREITTPASGTYTEKDTWDES

SEQ ID NO: 127 - protein, 570 aa, Alternaria sp.
ADTSAWKSRSIYFVLTDRIARSSSDTGGGSCSNLGNYCGGTFKGLESKLDYIKNLGFDAIWITPVVANSAGGYHGYWAQDLYAVNSNYGTAADLKSLVNTAHSKGIYVMVDVVANHMGQGAISGNRPEPLNQDSSYHSACDINYSSQTSIEQCRIANLPDLNTQSSQIRSLLNTWISWLVNEYSFDGVRIDTVKHVEKDFWPGFASAAGVYSIGEVWDGNPTYLAEYARLMPGLLNYATYYPMNNFYQQKGSSQALVDMMNTVRDTFPDPSALGTFLDNHDNNRWLNQKNDVTLLKNALAFVILSRGIPIVYYGTEQGYAGGADPANREDLWRSSFNTNADLYQAIKKLNAARTSAGGLAGNDHTHLYVSSNAYAWSRANGNLVVLTTNAGSGSNAQHCFNTQKANGRWTNVYGNGATVTADGSGNICVNVANGEPVVLLVSTATPTSATPTSNPSPTTLLTTSTACPTSVSVSFTHRVTTVFGDTIKITGNTAQLGNWNPSNGVALSAASYTSSNPIWTLTLPLPAGSAIQYKFVKVSSGGTVTWESDPNRSYSVPGCQASASVSSQWQ

SEQ ID NO: 128 - protein, 551 aa, Rhizopus microsporus
SPITIRSQNSNDWSSRVIYQLLTDRFAKTVDDQSPCSDLGNYCGGSFQGIINHLDYIAGMGFDAIWISPIPQNAQGGYHGYWATNFSAINSNFGSSNDLKKLVQAAHAKNMYVMLDVVANHVGTPSTPNNYNGYTFNQGSYYHSYCDINYNDQTSVEQCWLSGLPDLNTENDYVVNTLYSTVSNWISEYGFDGIRIDTVKHVRKDFWDGYVKAAGVFATGEVLHGSVSYVAPYQSHVPSLINYPLYYPIYDVFTKAATMTRLKSGYNDIQSGGFSNLNLLLNFIDNHDNPRLLSKADQSLVKNALTYSMLIQGIPVVYYGTEQSYKGGNDPNNREPLWTSGYSSSSEMYQFIKQVIQIRKGSNATVTMDIDQADNVYVFQRGNYLAVVNNYGQGSTNSVTVKSGSFADGTVLKDVFSGATATVKNKSITFQLQNGNPAVFSPQGATSPGGSSGSVEVTFDVYATTVYGQNIYITGDVSELGNWTPANGVALSSANYPTWSATIALPADTTIQYKYVNIDGSTVIWEDAISNREITTPASGTYTEKDTWDES

SEQ ID NO: 129 - protein, 565 aa, Syncephalastrum racemosum
VPLSIIDKRAGVTTLSKRAAADDWKSRSIYQIVTDRFARSDGSTSGCGDLSNYCGGDYKGIQNQLDYIAGMGFDAIWISPIPENTDGGYHGYWAKNFEALNTNFGSADDLKALVTAAHGKGMYVMLDVVANHAGPTSGGDYSGFTFDSASNYHAQCDIDYENQTSIEQCWVADNLPDINTEDDTIVSKLHSIVSDWVTTYDFDGIRIDTVKHIRKDFWSGYEEAAGVFATGEVFDGDAAYVGPYQDQLSSLINYPLYYAIRDVFTAGSGFSRISDMLSSINSNFKDPSVLTTFVDNQDNARFLSVKSDTSLYKNALAFTILTEGIPVVYYGTEQGFKGGNDPNNREVLWTSNYDTSSDLYKFIKIVNDQVRQKSNKTVKLNVDVGTNTYAFTHGKNLIVVNNYGSGSTASVTVKVGDSIADGTKLVDAVSNITATVSGGSITFSLNNGLPALFVPSSGATSPGGSSGSVEVTFDVYATTVYGQNIYITGDVSELGNWTPANGVALSSANYPTWSATIALPADTTIQYKYVNIDGSTVIWEDAISNREITTPASGTYTEKDTWDES

SEQ ID NO: 130 - protein, 583 aa, Rhizomucor pusillus
ATSDDWKGKAIYQLLTDRFGRADDSTSNCSNLSNYCGGTYEGITKHLDYISGMGFDAIWISPIPKNSDGGYHGYWATDFYQLNSNFGDESQLKALIQAAHERDMYVMLDVVANHAGPTSNGYSGYTFDDASLYHPKCTIDYNNQTSIEQCWVADELPDIDTENSDNVAILNDIVSGWVGNYSFDGIRIDTVKHIRKDFWTGYAEAAGVFATGEVFNGDPAYVGPYQKYLPSLINYPMYYALNDVFVSKSKGFSRISEMLGSNRNAFEDTSVLTTFVDNHDNPRFLNSQSDKALFKNALTYVLLGEGIPIVYYGSEQGFSGGADPANREVLWTTNYDTSSDLYQFIKTVNSVRMKSNKAVYMDIYVGDNAYAFKHGDALVVLNNYGSGSTNQVSFSVSGKFDSGASLMDIVSNITTTVSSDGTVTFNLKDGLPAIFTSATGGTTTTATPTGSGSVTSTSKTTATASKTSTSTSSTSCTTPTAVAVTFDLTATTTYGENIYLVGSISQLGDWETSDGIALSADKYTSSDPLWYVTVTLPAGESFEYKFIRIESDDSVEWESDPNREYTVPQACGTSTATVTDTWR

SEQ ID NO: 131 - protein, 553 aa, Dichotomocladium hesseltinei
QPVNITKRASAADWRSRAIYQVLTDRFARTDGSTSGCSNLSNYCGGTFKGITNKLDYIANLGFDAIWISPIPTNSPGGYHGYWATDFYGINSNFGSSNDLKELVNAAHAKGMYVMLDVVANHAGPTSNGDYSGYTFGSSGLYHNRCSINYNDQRSIEQCWVADDLPDINTENNDNVNKPNNIVSTWVKTYGFDAIRIDTVKHVRKDFWPGYTSAAGVFATGEVFDGNPSYVADYQNYMESLINYPLYYALNDVFASGYSFSRLSNQRVANYHAFKDVSVLPIFIDNHDNPRFLNKKNDIAQFKNALTYVLLGEGIPVVYYGSEQAYAGGADPANREALWSSGFSTNSDMYQFIAKLNRVRQKSNKSVYMDLDVQNNVYAFMHGKSLVVLNNFGNGASRQVTVNVGAQVASNTRLTDVVSGTSVTVSGSSVTFTINNGLPAVFTVSGATSPGGSSGSVEVTFDVYATTVYGQNIYITGDVSELGNWTPANGVALSSANYPTWSATIALPADTTIQYKYVNIDGSTVIWEDAISNREITTPASGTYTEKDTWDES

SEQ ID NO: 132 - protein, 552 aa, Lichtheimia ramosa
RPFVKRATADDWRDRAIYQILTDRFARSDGSTDNCSDLSNYCGGNYQGIIQQLDYIEGMGFDAIWISPIPANADGGYHGYWATDFESLNDHFGSQDDLKALVDAAHERGMYVMLDVVANHAGPTNNGDYSGYTFGSSDLYHPQCSIDYSNQNSIEQCWVADNLPDIDTENDSNVNKLHDIVSTWVSTYGFDGIRIDTVKHVRKDFWPGYASAAGVFATGEVYDGDQTYVGAYQDYLDSLLNYPLYYALNDVFASGQGFQRLSNQRNAIMSAFKDVSVLTSFVDNHDVARFLSTKNDQALFKNALAFVLLGETIPVVYYGSEQGFAGGADPANREALWSSGYDTSSDLYQFIATINNNVRQKSGKKVYMDLDVQDNVYAFMHGDALVVLNNYGSGASNQVSVNVGAQVAESTSFTDAISGTSITVSSGSVTFTLDNGNPAIFVPAGATSPGGSSGSVEVTFDVYATTVYGQNIYITGDVSELGNWTPANGVALSSANYPTWSATIALPADTTIQYKYVNIDGSTVIWEDAISNREITTPASGTYTEKDTWDES

SEQ ID NO: 133 - protein, 587 aa, Penicillium aethiopicum
ARTADWKPRSIYQTMTDRFARTDGSTTSPCNTKAGLYCGGTWRGTIDHLDYIQGMGFDAVMISPIIENIEGRVDYGEAYHGYWPLNLDNLNSHFGTHQDLLDLSDALHSRGMYFMMDTVINNMAYITNGSDPATDIDYSVFTPFNNADYFHPYCTMNWSVPAIAQRCNTGDDTVALPDLFTEHEDVQQLLIKWANKAIKTYSIDGLRIDAAKHVNPDFLRKFSDGVDIFMTGEVLEGSVSIMEDYQSNYINSLPNYPIYFEILSAFTNGNTSQLAIAVENMRVAIPDVNAMASFSENHDKPRIASYNDDMSIAKNVLVFTMLFDGIPMIYQGQEQHLKGDGVPHNREAIWLSKYDTEAELYKLIAKLNRIRNHAGYLGSDYFEDATHPIYQGSSELAFTKGVQGRQVVMVLSNQPSTSGRYALDLAVSYNAGTELMDVLNCNNYTVDNQGVLRVDMDKGEPRVFFPRKYMEGSGLCGYSGATSPGGSSGSVEVTFDVYATTVYGQNIYITGDVSELGNWTPANGVALSSANYPTWSATIALPADTTIQYKYVNIDGSTVIWEDAISNREITTPASGTYTEKDTWDES

SEQ ID NO: 134 - protein, 597 aa, Subulispora sp.
LTPAEWGSQSIYQVLTDRFALTDGSTTASCDLNTYCGGTWLGIQNHLDYIQGMGFTAIWISPIVTNIAGDSVDGDSYHGYWAQDITTVNSAFGTEQDLINLSAALHERGMYLMVDVVNNHMGYLGCGTCVDYSEYTPFNEESYYHPYCPTDYSNLTSIQVCWEGDNIVSLPDLRTEDSDVRSMWYDWITPLVAKYSIDGLRMDSAEHVEKSFWPGWVSASGVYNVGEVDEGDPTIFPDWLNYIDGTLNYPAYYWITQAFQSTSGSISNLVTGVNQLKASMKTSTFGSFLENHDQPRFPSLTSDTDLAKNAIAFAMLADGVPIVYYGQEQGYSGGGVPNDREPLWTSGYSTTSAGYTFIKTINAVRHLAVTQDTAYVAYQAYPIYSDSRVIAMKKSSVLAVFSNIGSSGSGYSITLPAGAFAASQALTDAVSCQTYTADASGGLTFTFGQAPSVFYATASLAGSGLCGTTGTGGSTGTTTASETGGSSPTSTACASVPVTFNEKVTTVVGETIKISGSVAALGDWATGSAVALSAASYTSSNPQWDVTISFAPGTVIEYKYINVASSGAVTWEADPNHTYTVPASCATAAVVSDTWQT

SEQ ID NO: 135 - protein, 601 aa, Trichoderma paraviridescens
LTAAQWRSQSIYQVLTDRFSQTNGATNSACNAGNQVYCGGTWQGIIKNLDYIKSMGFTAIWISPVVENLAGNSADGEAYHGYWAQDIYQVNTNFGSAADLRALSEALHNAGMYLMVDIVTNHMGYLGCGTCVQYNTFNPFNSQSYYHPFCLINFNSSNMTQIQNCWEGDNTVSLPDLATENANVLSMWQTWITQLVANYTIDGLRMDSCFELNYGYFEPFQSSANVYIVGEVDNGDPAIVCPYQKNYGLNTLNYPAYYWITQAFQSTSGSISNLVNGLNTMKSECSDTTLLGSFMENHDNPRFPSLTSDISLAKNAIAFTMLADGIPIIYEGQEQHLNGGGVPNNREAIWLSGYSTSAVLYTHIKALNQIRSQAIKQNSAYVTTQAAVTYSDSSTIVTRKGSTGSQIVGVFSNKGANGNSYTLTLPSADTGFTSNEQVVEILSCTAYTTDSSGNLAVAMAGGLPRVFYARSSLSGSGICPNLGSGGGTPTSTPPTSCTAIPVTFDEKVTTTFGQTIKIAGDISALGNWNTANAVTLSAANYTSSNPLWAITLNLAPGQVVEYKYINVAQNGGVTWEADPNHTYTVPSACTAQPTVANTWQG

SEQ ID NO: 136 - protein, 598 aa, Byssoascus striatosporus
LSADDWRAQSIYQLLTDRFALTNGSTTAPCDTEEQIYCGGSWQGIIDKLDYIQGMGFTAIWISPVVENLSGDSADGEAYHGYWAQNVYEVNPNFGATSDLVALSQVVHDKGMYLMLDVVTNHMGYLGCGTCVDYSVFNPFNEESYYHPFCLIDYDNTTSIEVCWEGDNIVSLPDLRTEDSDVLSTWESWVTELVSNYTVDGIRLDSTEELDQAFLPPFESAAGVYIVGEVDNGDPAVVCPYQEYVSGVLNYPAYYWITQAFESTSGSIGNLVNGINTMKSDCSDTSLLGSFLENHDQPRFASLTSDISLAKNAIAFSMLQDGIPIVYAGEEQHYSGGAVPNDREALWLSGYPTSSTLYTWITSLNQIRSHAIATNSSYLTYNAYPVYSDDSTIVMRKGFADNQIVSVYTNQGADATAYTLDLPSTDTGFTASQSLVEIGGCTTTATDDSGNLAVAMASGLPRIYYPAAGLSGSGVCGQLGSGGGTPTSTPPTSCTAIPVTFDEKVTTTFGQTIKIAGDISALGNWNTANAVTLSAANYTSSNPLWAITLNLAPGQVVEYKYINVAQNGGVTWEADPNHTYTVPSACTAQPTVANTWQG

SEQ ID NO: 137 - protein, 615 aa, Aspergillus brasiliensis
LSAAEWRTQSIYFLLTDRFGRTDNSTTATCNTGDQIYCGGSWQGIINHLDYIQGMGFTAIWISPITEQLPQDTSDGEAYHGYWQQKIYDVNSNFGTADDLKSLSDALHARGMYLMIDVVPNHMGYAGSGNDVDYSVFDPFDSSSYFHPYCLITDWDNLTMVQDCWEGDTIVSLPDLNTTETVVRTIWYDWVADLVSNYSVDGLRIDSVLEVEPDFFPGYQEAAGVYCVGEVDNGNPALDCPYQDYLDGVLNYPIYWQLLYAFESSSGSISDLYNMIKSVASDCSDPTLLGNFIENHDNPRFAYYTSDYSQAKNVLSYIFLSDGIPIVYAGEEQHYSGGDVPYNREATWLSGYDTSAELYTWIATTNAIRKLAIAADSSYITYANDPIYTDSNTIAMRKGTSGSQVITVLSNKGSSGSSYTLTLSGSGYTSGTKLIEAYTCTSVTVDSNGDIPVPMASGLPRVLLPASVVDDSSLCGGSGSSTSTTTSTATATTTSKTSTTSSSSSSSSCTASATAIPITFEELVTTTYGEEIYLSGSISQLGDWDTSDAVKLSADDYTSSNPEWSVTVTLPVGTTFEYKFIKVESGGSVTWESDPNREYTVPECGSGETVVDTWR

SEQ ID NO: 138 - protein, 604 aa, Penicillium subspinulosum
ALSAEWRTQSIYFLLTDRFGRTDNSTTATCDTGDQIYCGGSWQGVINHLDYIQGMGFTAIWISPITEQLSGDTSDGEAYHGYWQQKIYNVNSNFGTADDLVALSDALHARDMYLMLDVVPNHMGYDGDGDDVDYSVFDPFDSSSYFHPYCLITDYDDIEMVQDCWEGDTIVSLPDLNTTETVVQDIWYAWVADLVANYSVDGLRIDSVLEVQPAFFPAYQSAAGVYCVGEVDNGDPTLDCPYQDYLDGILNYPIYYQLLYAFESSSGSISDLYDMINSVASDCSDPTLLGNFIENHDNPRFAYYTSDYSQAKNVASFIFLSDGIPIVYAGQEQHYSGGDVPYDREATWLSGYSTTAELYTWIATTNSIRKLAISLDDDYITYVNDPFYTDENTIAMRKGTSGLQVITVLSNLGADGSAYTLTLSGSGYDSGTDLIEVYTCTSVTVDSSGDIAVPMESGLPRVFLPESSIKDSDLCSGTTTTTTSTAATATATSTSTCTAATEVSIIFEELVTTTYGEEIYLSGSISELGSWDTSDALELSAANYTSSNPEWYLEVTLPVGTSFEYKFIMIESDGTVVWESDPNRSYTVPSACSGAVETVVDTWR

SEQ ID NO: 139 - protein, 606 aa, Penicillium antarcticum
LTPAEWRSQSIYFMLTDRFGRSDNSTTAACNVSDRTYCGGTWQGIINHLDYIQGMGFTAIWITPVTEQLPQDTGDGEAYHGYWQQNIYEVDSNLGTAADLLALSEALHARGMYLMVDVVANHMGYAGAGSSVEYSVFHPFSSSSYFHSYCLISNYDDQSNVEDCWLGDTIVSLPDVDTTQTAVQTLWYDWIGDLVSNYSIDGLRIDTVKHVQKSFWPGYNDAAGVYCVGEIFDGDPAYTCDYQNYMDGVLNYPIYYQLLYAFQSSSGSISDLYDMINSVKSDCADPTLLGNFIENHDNPRFASYTSDYSQAKNVISFLFLSDGIPIIYSGQEQHYSGGADPANREATWLSGYSTTAELYKYIATTNRIRKAAVSADSSYITTKNVPFYQDSHTLAMKKGSSASPVITVLSNYGSSGSSYTLSLSGSGYSSGTNLMEMYTCTSVTVDSSGNIAVPMASGLPRVLMLASSASSICASSTTTSTATVATQTTTLTTTGTSCTQATVLPVLFKELVTTTYGQNVYISGSISQLGSWDTSSAIALSASSYNSSNPLWQVAITLPVGTSFQYKFLEKTTGSTTIQWESDPNRSYTVPTGCVGTTATAIATWR

SEQ ID NO: 140 - protein, 609 aa, Penicillium coprophilum
LTPAEWRSQSIYFLLTDRFGRTDNSVTANCNVNDRVYCGGTWQGIINQLDYIQGMGFTAIWITPVTKQLSQNTGDGTSYHGYWQQDIYNVNPNHGTSDDLLALSKALHARGMYLMVDVVANHMGYAGAGNNVDYSVFTPFNSASYFHSYCLISNYNDQSNVENCWLGDTTVSLPDLDTTQSSVQTLWNNWISDLVSKYSIDGLRVDTVKHVQKSFWPAFNRAAGVYSVGEVFDGSPSYTCDYQKYMDGVLNYPMYYPLLRAFQSTSGSISDLYNMIGTLSSTCADSTLLGNFIENHDNPRFPSYTSDYSQAKNVLSFLFLSDGIPIVYSGQEQHYSGGSDPANREALWLSKYSTTAELYKYIATTNKIRKAAVAADSSYITSKNVAFYQDSHTLAMKKGSGSSPVITVLSNAGSSGSSYTLYLSGSGYSSGTQLMELYTCTSVTVDSSNKIAVPMASGLPRVFVLASSVSNSGLCGSSTPTTTATTATTATQTTTATTTAGGCTQATALPVLFKELVTTSYGQDIYISGSISQLGTWDTSKAVALSADSYTSSNPLWQATITLPVGTTFQYKFIKKANGAITWESDPNRSYTVPTGCSGSTATVTASWK

SEQ ID NO: 141 - protein, 602 aa, Penicillium olsonii
LTPAEWRSQSIYFLLTDRFGRDDNSTTATCNTGDRTYCGGTWQGIINQLDYIQGMGFTAIWITPVTEQLSANTGYGTAYHGYWQQDIYEVNPNHGSSADLKALSAALHARGMYLMVDVVANHMGYNGIGSSVDYSVFNPFSSSSYFHSYCLISNYNDQSNVENCWLGDTTVSLPDLDTTQTAVQTIWNEWITDLVSNYSIDGLRIDTVKHVQKSFWPGFNDAAGVYSVGEIFDGNPSYTCDYQNYLDGVLNYPIYYPLLYAFQSTSGSISDLYNMINTVASDCADSTLLGNFIENHDNPRFPSYTGDYSQAKNVISYLFLSDGIPIIYSGQEQHYSGASDPANREALWLSGYSTTAELYKWIATTNKIRKLAVSADSSYITSKNSPFYQDSHTLGMKKGSVITILSNNGASGSSYTLSLSGSGYSSGTKLMELYTCTSITVDSSGNIPVPMVSGLPRALIPASSIGSNGLCGSTTSPTTTAATQTTTATTTGTCTQATALPVLFKELVTTSYGQNVYISGSISQLGNWDASSAIALSASSYTSSNPLWQVTITLPVGTKFEYKFIEKSSGSATATWESDPNRSYTVPTGCAGTTATVTATWR

SEQ ID NO: 142 - protein, 621 aa, Penicillium vasconiae
LTAAEWRTQSIYFLLTDRFGRTDNSTTATCSVSDRIYCGGSWQGIINHLDYIQGMGFTAIWITPVTEQLSQDTGDGEAYHGYWQQEIYNVNTNYGTAADLLALSKALHSRGMYLMVDVVANHMGYDGAGNTVDYSVFNPFDSSSYFHSYCEISDYSNQTNVEDCWLGDTTVSLPDLDTTLSSVQTIWYNWVTELVSNYSIDGLRIDTVKHVQKSFWPGYNSAAGVYCVGEVFDGDPAYTCPYQSYLDGVLNYPIYYQLLYAFESTSGSISSLYNMINSVASDCSDPTLLGNFIENHDNPRFASYTSDYSQAKNVISFIFFSDGIPIVYAGQEQHYSGGSDPANREATWLSGYDTTATLYKYITSTNKIRSLAISKDTAYITSKNNAFYTDSNTIAMKKGSSGSQVITVLSNRGSSGSSYTLTLSGSGYSSGTQLMEMYTCTAVTVDSSGNIAVPMASGLPRIYMLASSACSICSSSCSTTTTTSTTSTSTTTASTLKTTTSTTSATSTTSTSCTQATALPVLFKEIVTTSYGQNIYISGSISQLGSWDTSNAVALSADQYTSSNNLWYVVVTIPVGTSFEYKFIEETSGSSTITWESDPNRSYTVPTGCAGSTATVTATWR

SEQ ID NO: 143 - protein, 615 aa, Penicillium sp.
LTAAEWRSQSIYFLLTDRFGRTDNSTTATCNVSDRIYCGGSWQGIINHLDYIQGMGFTAIWITPVTEQLSQDTGDGEAYHGYWQQEIYNVNTNYGTAADLLALSKALHSRGMYLMVDVVANHMGYDGAGNTVDYSVFNPFDSSSYFHSYCEITDYSNQTNVEDCWLGDTTVSLPDLNTTLSSVQTIWYDWVAALVSNYSIDGLRIDTVKHVQESFWPEYNSAAGVYCVGEVFDGDPAYTCPYQNYLDGVLNYPIYYQLLYAFESTSGSISDLYNMINSVASDCSDPTLLGNFIENHDNPRFASYTSDYSQAKNVLSFIFFSDGIPIVYAGQEQHYSGGSDPANREATWLSGYDTSAELYTWITSTNKIRSLAVSKDTAYITSKNDAFYTDSNTIAMKKGSGGSQVVTVLSNRGSSGSSYTLTLSGSGYSSGTKLMEMYTCTAVTVDSSGNIAVPMASGLPRVYMLASSACSICSSACSTTTTSSTTSTATTTSTTLKTTTTTTSTSCTQATALPVLFKEIVTTSYGQNIYISGSISELGDWDTSNAVALSADQYTSSNNLWYVVVTIPVGTSFEYKFIEETSGSSSITWESDPNRSYTVPTGCAGSTATVTATWR

SEQ ID NO: 144 - protein, 606 aa, Heterocephalum aurantiacum
LTAAEWRQQSIYFLLTDRFARTDGSTTAACNLSQRAYCGGSWQGIINHLDYIQGMGFTAIWITPVTKQIEASTSDGTAYHGYWQQDIYNINSHYGTADDLRALSSALHSRGMYLMIDVVANHMGYPGAGTSVDYSIFTPFGSSSYFHSYCQITDYDNQSNVENCWLGDNVVSLPDLNTQNSNVRNLWYDWVEELVANYSVDGLRVDTVKHVEKDFWPSYNAAAGVYCVGEVFHGDPAYTCPYQNYMDGVLNYPIYYQLLYAFQSSSGSITDLYNMINSVASDCKDPTTLGNFIENHDNPRFPSYTSDMSQAKSVIAFLFLSDGIPIIYAGQEQHYSGGADPNNREAIWLSGYSTSSTLYQFISSTNSIRKLAISKDSSYLTSRNNPFYTDSNTIAMRKGSSGSQVITVLSNKGSSGNSYTLTLTNHGYSSGAQLTELYTCSSIQVASSGGLAVPMASGLPRVLVPSSWIQGSGLCGGGSTTTTTTATTTTTTTTSTSSCAAATSLAVVFNELVTTYYGENIFIAGSISQLGSWDTGKSVALSASQYTSSNPLWTATVSLPVGTSFQYKFIKKEPDGQVVWESDPNRSYTVPAGCAGTTQTVNTSWR

SEQ ID NO: 145 - protein, 602 aa, Neosartorya massa
LTPAEWRSQSIYFLLTDRFGREDNSTTAACDVTQRLYCGGSWQGIINHLDYIQGMGFTAIWITPVTEQFYEDTGDGTSYHGYWQQNIYEVNYNYGTAQDLKNLADALHARGMYLMVDVVANHMGYDGAGNTVDYSVFTPFDSSSYFHPYCLISDYSNQTNVEDCWLGDTTVSLPDLDTTDTTVRTIWYDWVKGLVANYSIDGLRIDTVKHVEKDFWPGYNDAAGVYCVGEVFSGDPTYTCPYQNYLDGVLNYPIYYQLLYAFESTSGSISNLYDMINSVASDCADPTLLGNFIENHDNPRFASYTSDYSQAKNVISFIFFSDGIPIVYAGQEQHYSGGADPANREAVWLSGYSTSATLYSWIASTNRIRKLAISKDAAYITSKNNPFYYDSNTLAMRKGSIAGAQVITVLSNKGSSGSSYTLSLSGTGYSAGASLVEMYTCTTLTVDSSGNLPVPMASGLPRVLVPSSWVSGSGLCGSGSTTTTTTTATATTTACTSATALPIVFEEVVTTTYGENVYLTGSISQLGNWDTSSAIALSASKYTSSNPEWYVTVTLPVGTSFQYKFFKKESDGSIVWESDPNRSYTVPTGCAGTTVTVSDTWR

SEQ ID NO: 146 - protein, 588 aa, Penicillium janthinellum
ATPAQWRSQSIYFMLTDRFARTDGSTTAPCDTSQRAYCGGTWQGIIDKLDYIQGMGFTAIWITPVTGQLDGDTGDGTAYHGYWQQDIYSLNSNYGTASDLKALASALHARGMYLMVDVVANHMGYNGAGNTVDYSVFDAFNSNQYFHSYCEVTNYSNQTNVEDCWLGDTTVSLPDLNTELSSVQSIWYNWVGSLVSNYSIDGLRVDTVKHVQKDFWPGYNKAAGVYCVGEVFDGDASYTCPYQEVMDGVLNYPMYYPLLRAFQSTSGSMSDLYNMINTVKSTCSDSTLLGTFVENHDNPRFASYTNDMSLAKNVAAFTIMADGIPIIYAGQEQHYSGGSDPANREAVWLSGYNTDSALYKLIAKVNAIRSYAISQSASYVTYKNYPIYQDASTLAMRKGSSGTQTITVLSNRGASGSQYTLSLGNTGYSTGTTLTEIITCAKITVDSSGNVPVPMASGEPRILYPSSSIKGSAICASSGRGATSPGGSSGSVEVTFDVYATTVYGQNIYITGDVSELGNWTPANGVALSSANYPTWSATIALPADTTIQYKYVNIDGSTVIWEDAISNREITTPASGTYTEKDTWDES

SEQ ID NO: 147 - protein, 589 aa, Aspergillus brasiliensis
ATPAEWRSQSIYFLLTDRFARTDNSTTASCDLSARQYCGGSWQGIINQLDYIQGMGFTAIWVTPVTAQIPQDTGYGQAYHGYWQQDAYALNSHYGTADDLKALATALHSRGMYLMVDVVANHMGHNGTGSSVEYSVYNPFNAKKYFHNLCWISNYDNQTNVEDCWLGDNTVALPDLDTTRTDVKNMWYDWVKSLVSNYSVDGLRVDTVKNVQKNFWPGYNNASGVYCIGEVFDGDASYTCPYQDDLDGVLNYPMYYPLLRAFKSTTGSISDLYNMINTVKSTCKDSTLLGTFIENHDNPRFANYTSDMSLAKNVATFTILADGIPIIYAGQEQHYSGGNDPYNREATWLSGYKTTSELYTHIAASNKIRTHAIKQDSGYLTYKNYPIYQDTSTLAMRKGYNGTQTITVLSNLGASGSSYTLSLPGTGYTAGQKITEIYTCTNLTVNSNGSVPVPMKSGLPRILYPTDKLVNGSSFCSSSGRGATSPGGSSGSVEVTFDVYATTVYGQNIYITGDVSELGNWTPANGVALSSANYPTWSATIALPADTTIQYKYVNIDGSTVIWEDAISNREITTPASGTYTEKDTWDES

SEQ ID NO: 148 - protein, 588 aa, Aspergillus westerdijkiae
ATPAQWRSQSIYFLLTDRFARDDGSTTATCNTEDRKYCGGTWQGIIDQLDYIQGMGFTAIWITPVTAQLTEDTKYGDAYHGYWQQDIYSLNENYGTADDLKALADALHERDMYLMVDVVANHMGYAGAGDSVDYSVFNPFNSQDYFHSFCLIQDYNDQTQSEDCWLGDNSVSLPDLDTTKSEVQDIWYDWVGGLVSNYSIDGLRIDTVKHVQKEFWPGYNDAAGVYCIGEILDGDASYTCPYQEVLDGVLNYPIYYPLLNAFKSTSGSISDLYNMINTVKSDCPDSTLMGTFIENHDNPRFASYTDDIALAKNVAAFTILADGIPIVYAGQEQHYAGGEDPANREATWLGKYNTDSELYKLIAASNAIRNHAISTDKEYVNYKNYPIYKDDSTIAMRKGFDGAQIITVLSNQGSSGSSYTLSLGDTGFSSGDKLTEIYTCTAVTVDSDGKVPVPMDGGAPRALFPTEKLSGSSLCSGSGRGATSPGGSSGSVEVTFDVYATTVYGQNIYITGDVSELGNWTPANGVALSSANYPTWSATIALPADTTIQYKYVNIDGSTVIWEDAISNREITTPASGTYTEKDTWDES

SEQ ID NO: 149 - protein, 476 aa, Hamigera avellanea
ATPADWRSRSIYFILTDRFARTDGSTTAECDTSARAYCGGTWRGIINKLDYIQNMGFTAIWITPVTAQLPGSTGHGSAYHGYWQQDIYSLEPNYGTADDLRALASALHERNMYLMVDVVANHMGWAGSGDSVDYSVFNPFDSADYFHPYCLISNYEDQTEVENCWLGDTNVALVDLDTTRSDVQNIWYEWVDSLVGNYSIDGLRIDTVRHVQKDFWPGFNDAAGVYSVGEVFSGDTAYTCPYQEVLDGVLNYPIYYPLLRAFQSTSGSINDLYNMINTVKSDCADSTLMGTFLENHDNPRFASYTSDVALAKNAIAFTILSDGIPIIYAGQEQHYSGGNDPANREAVWLSGYSTDSELYSFVAVTNQIRNYAISQDQGYVTWKNVPIYQDTSTLAMRKGTDGSQVITVLSNLGASGSSYTLTLGGSGYSSGQQLTEIFSCATVTVDSSGNIPVPMGSGQPKVFYPTAGLGGSGICQ

SEQ ID NO: 150 - protein, 586 aa, Hamigera avellanea
ATPADWRSRSIYFILTDRFARTDGSTTAECDTSARAYCGGTWRGIINKLDYIQNMGFTAIWITPVTAQLPGSTGHGSAYHGYWQQDIYSLEPNYGTADDLRALASALHERNMYLMVDVVANHMGWAGSGDSVDYSVFNPFDSADYFHPYCLISNYEDQTEVENCWLGDTNVALVDLDTTRSDVQNIWYEWVDSLVGNYSIDGLRIDTVRHVQKDFWPGFNDAAGVYSVGEVFSGDTAYTCPYQEVLDGVLNYPIYYPLLRAFQSTSGSINDLYNMINTVKSDCADSTLMGTFLENHDNPRFASYTSDVALAKNAIAFTILSDGIPIIYAGQEQHYSGGNDPANREAVWLSGYSTDSELYSFVAVTNQIRNYAISQDQGYVTWKNVPIYQDTSTLAMRKGTDGSQVITVLSNLGASGSSYTLTLGGSGYSSGQQLTEIFSCATVTVDSSGNIPVPMGSGQPKVFYPTAGLGGSGICQSSGATSPGGSSGSVEVTFDVYATTVYGQNIYITGDVSELGNWTPANGVALSSANYPTWSATIALPADTTIQYKYVNIDGSTVIWEDAISNREITTPASGTYTEKDTWDES

SEQ ID NO: 151 - protein, 576 aa, Meripilus giganteus
RPTVFDAGADAHSLHARAPSGSKDVIIQMFEWNWDSVAAECTNFIGPAGYGFVQVSPPQETIQGAQWWTDYQPVSYTLTGKRGDRSQFANMITTCHAAGVGVIVDTIWNHMAGVDSGTGTAGSSFTHYNYPGIYQNQDFHHCGLEPGDDIVNYDNAVEVQTCELVNLADLATDTEYVRGRLAQYGNDLLSLGADGLRLDASKHIPVGDIANILSRLSRSVYITQEVIFGAGEPITPNQYTGNGDVQEFRYTSALKDAFLSSGISNLQDFENRGWVPGSGANVFVVNHDTERNGASLNNNSPSNTYVTATIFSLAHPYGTPTILSSYDGFTNTDAGAPNNNVGTCSTSGGANGWLCQHRWTAIAGMVGFRNNVGSAALNNWQAPQSQQIAFGRGALGFVAINNADSAWSTTFTTSLPDGSYCDVISGKASGSSCTGSSFTVSGGKLTATVPARSAIAVHTGQKGSGGATPTSAPSTTPTSGTVSMTFAEQATTTFGENIFLVGSISQLGNWNPASAIALSSAAYPTWSVSVNIPAGTTFQYKFIRKETDGSVVWESDPNRQATAPASGTTTLTSSWR

SEQ ID NO: 152 - protein, 575 aa, Cerrena unicolor
RPLNASNALDARAPSGAKSVIIQMFEWTWDSVAAECTNFIGPAGYGFVQVSPPQETIQGDQWWTDYQPVSYILTSKRGTRDQFAAMIDTCHDAGVKVIVDTIWNHMAGVESGTGVAGSSFTHYNYPGIYQNQDFHHCGLESGDDIVNYDNAQEVQTCELVNLADLATETDYVRGRLAEYGNDLLSLGADGLRLDAAKHIAVGDLANIIGRLNSTPYITQEVIFGSGEPITPNQYTGNGDVQKFRYTSALKDAFLNGDISSLQDFENRGWVAGSGANVFVTNHDTERNGNSLNNNSPNNAYTLAMIFSLAHPYGTPSILSSYSGFTDTDAGAPNGGAGTCSGSGGSNGWLCQHRWTAVAGMVGFRNTVGSAALNNWVSPQSSQIAFGRGALGFVAINNGDSTWSTTFTTSLPDGTYCDVITGTSSSGSCTGSSFTVSGGTFTANVAARDAVAIHTGATGTGSGSGNTSTGSGGTTSDTVSVSFAETATTTFGENIFLVGSISQLGAWDPASAIALSSASYPTWTVTVTLPAGTTFEYKFIRKETDGSVVWESDPNRQATTPSSSDAATTTLSTSWR

SEQ ID NO: 153 - protein, 562 aa, Physalacria cryptomeriae
APFLELQVRAPSSTKQVIIQMFEWTWDSVAAECTDFIGPAGYGYVQVSPPAEHITGDQWWTDYQPVSYILTSKRGNRSQFANMVTTCHTAGVLVIADALFNHMAGIESGTGTAGSSFTHYDYPGIYQTQDFHHCGLTSGDDISDYSSQAQVQTCELVNLADLATDTEYVRAKLASYANDLISLGVNGLRLDAAKHIATDDIKNILSRLSSTVYITQEVIFGSGEPVTPSMYTQNGDVQEFRYTSTLQSAFSGGDISQLQNLDSKGWIAGTSANVFVANHDTERGGSSLNYKSSSNTYVTATIFSLAHPYGTPTILSSYEFSDTDAGSPNGGAGTCSTTGGANGWLCQHRWVAFSGMVGFHNNVGTASLTNWVSPQSNQIAFERSGKGFVAINNADSAWTATFTTSLAAGSYCDVITGTSNGSACSGTSYTVSGGSFSATVAARSAVAIHTGATGSGSGGGGGSTGSVAITFQETATTTLGENIFLVGSISQLRTWAPASAIALSSASYPTWSVTVSIPAGTTFEYKFIRKESDGSVVWESDPNRSATASSSASTQTILTSWR

SEQ ID NO: 154 - protein, 578 aa, Lenzites betulinus
RPASTVFHGAETRSLDARAPSGSKDVIIQMFEWTWDSVAAECTNFIGPAGYGFVQGSPPQEHIQGAQWWTDYQPVSYTLTSKRGDRTSFANMIQTCHTAGVGVIVDTLFNHMAGVDSGTGVAGSSFTHYNYPGIYQNQDFHHCGLEPGDDIVNYDNAVEVQTCELDNLADLATETEYVRGRLAQYGNDLLSLGADGMRLDAAKHIAVGDIANILSRLNRTVYITQEVIFGAGEPITPNQYTGNGDVQEFRYTSALQDAFLNSGIANLQVLENRGWVPGSGANVFVTNHDTERNGASLNNNSPSNTYVTAMIFSLAHPFGTPSILSSYSGFTDTDAGAPNGGVGTCSGSGGTNGWLCQHRWTAVAGMVGFRNQVGSAALGNWQSPQSQQIAFGRGALGFVAINNADSAWSATFTTSLPDGSYCDVISGQTSGSTCTGSSFTVSGGSLSATVPARSAIAVHTGQKGTGSGSGTGTGGGGSTGSGNVAVNFAETATTTFGENIFVVGSISQLGTWNTANAIALSSPSYPTWTVSISIPAGTTFQYKFIRKETDGSVVWESDPNRQATAPASGSTTLSTSWR

SEQ ID NO: 155 - protein, 571 aa, Trametes ljubarskyi
RPATFDAADARSVQPRAPSGSKDVIIQMFEWTWDSVAAECTNFIGPAGYGFVQGNPPQEHIQGDQWWTDYQPVSYILTSKRGDRTAFANMISTCHAAGVGVIVDTIFNHMSGVDSGTGVAGSSFTHYNYPGIYQNQDFHHCGLEPGDDIVNYDNAVEVQTCELENLADLATDTEYVRGRLAQYANDLLSLGADGLRLDAAKHIPTGDIANILSRLNRSVYITQEVIYGDGEPITPNQYTGNGDVQEFRYTTALKNAFLGGGISSLQSFDNLGWVPGTGANVFVTNHDTERNGNSLNNNSPSNTYVTAMIFSLAHPYGTPTILSSYSGFTNTDAGAPNGGTGTCSGSGGANGWLCQHRWTAVAGMVGFRNNVGSAALTNWQSPQSQQIAFGRGALGFVAINNADSAWSTTFTTSLPDGSYCDVVSGTSSNGGCTGSSFSVSGGSLTATVPARSAIAIHTGETGSGSNSGGGSGGSGTVTINFAETATTTFGENIFVVGSIPQLGSWNPANAIALSSASYPTWTVSVSVPAGTTFEYKFIRKETDGSVVWESDPNRSDTAPASGTQTITTSWR

SEQ ID NO: 156 - protein, 451 aa, Bacillus subtilis
GPAAASAETANKSNELTAPSIKSGTILHAWNWSFNTLKHNMKDIHDAGYTAIQTSPINQVKEGNQGDKSMSNWYWLYQPTSYQIGNRYLGTEQEFKEMCAAAEEYGIKVIVDAVINHTTFDYAAISNEVKSIPNWTHGNTQIKNWSDRWDVTQNSLLGLYDWNTQNTQVQSYLKRFLERALNDGADGFRFDAAKHIELPDDGSYGSQFWPNITNTSAEFQYGEILQDSASRDAAYANYMDVTASNYGHSIRSALKNRNLGVSNISHYAYDVSADKLVTWVESHDTYANDDEESTWMSDDDIRLGWAVIASRSGSTPLFFSRPEGGGNGVRFPGKSQIGDRGSALFEDQSITAVNRFHNVMAGQPEELSNPNGNNQIFMNQRGSHGVVLANAGSSSVSINTPTKLPDGRYDNKAGAGSFQVNDGKLTGTINARSVAVLYPDDIEIRCNTFFQ

SEQ ID NO: 157 - protein, 633 aa, Bacillus subtilis
GPAAASAETANKSNELTAPSIKSGTILHAWNWSFNTLKHNMKDIHDAGYTAIQTSPINQVKEGNQGDKSMSNWYWLYQPTSYQIGNRYLGTEQEFKEMCAAAEEYGIKVIVDAVINHTTSDYAAISNEVKSIPNWTHGNTQIKNWSDRWDVTQNSLLGLYDWNTQNTQVQSYLKRFLDRALNDGADGFRFDAAKHIELPDDGSYGSQFWPNITNTSAEFQYGEILQDSASRDAAYANYMDVTASNYGHSIRSALKNRNLGVSNISHYASDVSADKLVTWVESHDTYANDDEESTWMSDDDIRLGWAVIASRSGSTPLFFSRPEGGGNGVRFPGKSQIGDRGSALFEDQAITAVNRFHNVMAGQPEELSNPNGNNQIFMNQRGSHGVVLANAGSSSVSINTATKLPDGRYDNKAGAGSFQVNDGKLTGTINARSVAVLYPDDIAKAPHVFLENYKTGVTHSFNDQLTITLRADANTTKAVYQINNGPETAFKDGDQFTIGKGDPFGKTYTIMLKGTNSDGVTRTEKYSFVKRDPASAKTIGYQNPNHWSQVNAYIYKHDGSRVIELTGSWPGKPMTKNADGIYTLTLPADTDTTNAKVIFNNGSAQVPGQNQPGFDYVLNGLYNDSGLSGSLPH

SEQ ID NO: 158 - protein, 487 aa, Schwanniomyces occidentalis; identical to SEQ ID NO: 79

SEQ ID NO: 159 - protein, 583 aa, Rhizomucor pusillus
ATSDDWKGKAIYQLLTDRFGRADDSTSNCSNLSNYCGGTYEGITKHLDYISGMGFDAIWISPIPKNSDGGYHGYWATDFYQLNSNFGDESQLKALIQAAHERDMYVMLDVVANHAGPTSNGYSGYTFGDASLYHPKCTIDYNDQTSIEQCWVADELPDIDTENSDNVAILNDIVSGWVGNYSFDGIRIDTVKHIRKDFWTGYAEAAGVFATGEVFNGDPAYVGPYQKYLPSLINYPMYYALNDVFVSKSKGFSRISEMLGSNRNAFEDTSVLTTFVDNHDNPRFLNSQSDKALFKNALTYVLLGEGIPIVYYGSEQGFSGGADPANREVLWTTNYDTSSDLYQFIKTVNSVRMKSNKAVYMDIYVGDNAYAFKHGDALVVLNNYGSGSTNQVSFSVSGKFDSGASLMDIVSNITTTVSSDGTVTFNLKDGLPAIFTSATGGTTTTATPTGSGSVTSTSKTTATASKTSTSTSSTSCTTPTAVAVTFDLTATTTYGENIYLVGSISQLGDWETSDGIALSADKYTSSDPLWYVTVTLPAGESFEYKFIRIESDDSVEWESDPNREYTVPQACGTSTATVTDTWR

SEQ ID NO: 160 - protein, 616 aa, Aspergillus niger
AEWRTQSIYFLLTDRFGRTDNSTTATCDTGDQIYCGGSWQGIINHLDYIQGMGFTAIWISPITEQLPQDTADGEAYHGYWQQKIYDVNSNFGTADDLKSLSDALHARGMYLMVDVVPNHMGYAGNGNDVDYSVFDPFDSSSYFHPYCLITDWDNLTMVQDCWEGDTIVSLPDLNTTETAVRTIWYDWVADLVSNYSVDGLRIDSVLEVEPDFFPGYQEAAGVYCVGEVDNGNPALDCPYQKVLDGVLNYPIYWQLLYAFESSSGSISNLYNMIKSVASDCSDPTLLGNFIENHDNPRFASYTSDYSQAKNVLSYIFLSDGIPIVYAGEEQHYSGGKVPYNREATWLSGYDTSAELYTWIATTNAIRKLAISADSAYITYANDAFYTDSNTIAMRKGTSGSQVITVLSNKGSSGSSYTLTLSGSGYTSGTKLIEAYTCTSVTVDSSGDIPVPMASGLPRVLLPASVVDSSSLCGGSGRTTTTTTAATSTSKATTSSSSSSAAATTSSSCTATSTTLPITFEELVTTTYGEEVYLSGSISQLGEWDTSDAVKLSADDYTSSNPEWSVTVSLPVGTTFEYKFIKVDEGGSVTWESDPNREYTVPECGNGSGETVVDTWR

SEQ ID NO: 161 - protein, 512 aa, Bacillus stearothermophilus
APFNGTMMQYFEWYLPDDGTLWTKVANEANNLSSLGITALWLPPAYKGTSRSDVGYGVYDLYDLGEFNQKGTVRTKYGTKAQYLQAIQAAHAAGMQVYADVVFDHKGGADGTEWVDAVEVNPSDRNQEISGTYQIQAWTKFDFPGRGNTYSSFKWRWYHFDGVDWDESRKLSRIYKFRGKAWDWEVDTEFGNYDYLMYADLDMDHPEVVTELKNWGKWYVNTTNIDGFRLDAVKHIKFSFFPDWLSYVRSQTGKPLFTVGEYWSYDINKLHNYITKTDGTMSLFDAPLHNKFYTASKSGGAFDMRTLMTNTLMKDQPTLAVTFVDNHDTEPGQALQSWVDPWFKPLAYAFILTRQEGYPCVFYGDYYGIPQYNIPSLKSKIDPLLIARRDYAYGTQHDYLDHSDIIGWTREGGTEKPGSGLAALITDGPGGSKWMYVGKQHAGKVFYDLTGNRSDTVTINSDGWGEFKVNGGSVSVWVPRKTTVSTIARPITTRPWTGEFVRWTEPRLVAWP

SEQ ID NO: 162 - protein, 483 aa, Bacillus halmapalus
HHNGTNGTMMQYFEWHLPNDGNHWNRLRDDASNLRNRGITAIWIPPAWKGTSQNDVGYGAYDLYDLGEFNQKGTVRTKYGTRSQLESAIHALKNNGVQVYGDVVMNHKGGADATENVLAVEVNPNNRNQEISGDYTIEAWTKFDFPGRGNTYSDFKWRWYHFDGVDWDQSRQFQNRIYKFRGKAWDWEVDSENGNYDYLMYADVDMDHPEVVNELRRWGEWYTNTLNLDGFRIDAVKHIKYSFTRDWLTHVRNATGKEMFAVAEFWKNDLGALENYLNKTNWNHSVFDVPLHYNLYNASNSGGNYDMAKLLNGTVVQKHPMHAVTFVDNHDSQPGESLESFVQEWFKPLAYALILTREQGYPSVFYGDYYGIPTHSVPAMKAKIDPILEARQNFAYGTQHDYFDHHNIIGWTREGNTTHPNSGLATIMSDGPGGEKWMYVGQNKAGQVWHDITGNKPGTVTINADGWANFSVNGGSVSIWVKR

SEQ ID NO: 163 - protein, 478 aa, Aspergillus oryzae
ATPADWRSQSIYFLLTDRFARTDGSTTATCNTADQKYCGGTWQGIIDKLDYIQGMGFTAIWITPVTAQLPQTTAYGDAYHGYWQQDIYSLNENYGTADDLKALSSALHERGMYLMVDVVANHMGYDGAGSSVDYSVFKPFSSQDYFHPFCFIQNYEDQTQVEDCWLGDNTVSLPDLDTTKDVVKNEWYDWVGSLVSNYSIDGLRIDTVKHVQKDFWPGYNKAAGVYCIGEVLDGDPAYTCPYQNVMDGVLNYPIYYPLLNAFKSTSGSMDDLYNMINTVKSDCPDSTLLGTFVENHDNPRFASYTNDIALAKNVAAFIILNDGIPIIYAGQEQHYAGGNDPANREATWLSGYPTDSELYKLIASANAIRNYAISKDTGFVTYKNWPIYKDDTTIAMRKGTDGSQIVTILSNKGASGDSYTLSLSGAGYTAGQQLTEVIGCTTVTVGSDGNVPVPMAGGLPRVLYPTEKLAGSKICSSS

SEQ ID NO: 164 - protein, 483 aa, Bacillus amyloliquefaciens
VNGTLMQYFEWYTPNDGQHWKRLQNDAEHLSDIGITAVWIPPAYKGLSQSDNGYGPYDLYDLGEFQQKGTVRTKYGTKSELQDAIGSLHSRNVQVYGDVVLNHKAGADATEDVTAVEVNPANRNQETSEEYQIKAWTDFRFPGRGNTYSDFKWHWYHFDGADWDESRKISRIFKFRGEGKAWDWEVSSENGNYDYLMYADVDYDHPDVVAETKKWGIWYANELSLDGFRIDAAKHIKFSFLRDWVQAVRQATGKEMFTVAEYWQNNAGKLENYLNKTSFNQSVFDVPLHFNLQAASSQGGGYDMRRLLDGTVVSRHPEKAVTFVENHDTQPGQSLESTVQTWFKPLAYAFILTRESGYPQVFYGDMYGTKGTSPKEIPSLKDNIEPILKARKEYAYGPQHDYIDHPDVIGWTREGDSSAAKSGLAALITDGPGGSKRMYAGLKNAGETWYDITGNRSDTVKIGSDGWGEFHVNDGSVSIYVQK

SEQ ID NO: 165 - protein, 583 aa, Rhizomucor pusillus; identical to SEQ ID NO: 130

SEQ ID NO: 166 - protein, 623 aa, Kionochaeta ivoriensis
LSPAGWRQQSIYQVMTDRFARTDGSTIASCDTSQQAYCGGTWQGLINKLDYIQGMGFTAVWISPMVHQMAGATSDGESYHGYWAQDINTVNSAFGTAADLKALSAALHARGMYLMLDVVTNHFAYDGCGTCVDYSIFNPFNSESYFHPFCLIDYSNTTSIQVCWEGDNTVSLPDLRTEDSDVRSIWNSWISSVISTYGVDGLRVDSAQQVETSFWAGFEAAAGVYMVGEVFNGDPTYVTPFQDYMDGVLNYPAYYWITQAFESTSGSISNLANGMNTMKSLAKNTSLLGSFLENHDNPRFPSLTSDMSLAQNAIAFTMLMDGIPIIYQGQEQHFSGGGVPSDREAVWLSGYPNDTTLYAWITKLNAVRSWAIAKDSSYLAYMAYPVYTDTHTIAMRKGDTGYQVISVYTNVGASGSSYSVTLTSADTGFTASQSVVDLVGCKTYTADSTGSLSLSLTGGIPIILYPAASLTGNTICTSTGGTTTTATPTGSGSVTSTSKTTATASKTSTSTSSTSCTTPTAVAVTFDLTATTTYGENIYLVGSISQLGDWETSDGIALSADKYTSSDPLWYVTVTLPAGESFEYKFIRIESDDSVEWESDPNREYTVPQACGTSTATVTDTWR

SEQ ID NO: 167 - protein, 588 aa, Aspergillus niger
LSAAEWRTQSIYFLLTDRFGRTDNSTTATCDTGDQIYCGGSWQGIINHLDYIQGMGFTAIWISPITEQLPQDTADGEAYHGYWQQKIYDVNSNFGTADDLKSLSDALHARGMYLMVDVVPNHMGYAGNGNDVDYSVFDPFDSSSYFHPYCLITDWDNLTMVQDCWEGDTIVSLPDLNTTETAVRTIWYDWVADLVSNYSVDGLRIDSVLEVEPDFFPGYQEAAGVYCVGEVDNGNPALDCPYQKVLDGVLNYPIYWQLLYAFESSSGSISNLYNMIKSVASDCSDPTLLGNFIENHDNPRFASYTSDYSQAKNVLSYIFLSDGIPIVYAGEEQHYSGGKVPYNREATWLSGYDTSAELYTWIATTNAIRKLAISADSAYITYANDAFYTDSNTIAMRKGTSGSQVITVLSNKGSSGSSYTLTLSGSGYTSGTKLIEAYTCTSVTVDSSGDIPVPMASGLPRVLLPASVVDSSSLCGGSGRGATSPGGSSGSVEVTFDVYATTVYGQNIYITGDVSELGNWTPANGVALSSANYPTWSATIALPADTTIQYKYVNIDGSTVIWEDAISNREITTPASGTYTEKDTWDES

SEQ ID NO: 168 - protein, 588 aa, Aspergillus oryzae
ATPADWRSQSIYFLLTDRFARTDGSTTATCNTADQKYCGGTWQGIIDKLDYIQGMGFTAIWITPVTAQLPQTTAYGDAYHGYWQQDIYSLNENYGTADDLKALSSALHERGMYLMVDVVANHMGYDGPGSSVDYSVFVPFNSASYFHPFCFIQNWDNQTQVEDCWLGDNTVSLPDLDTTKDVVKNEWYDWVGSLVSNYSIDGLRIDTVKHVQKDFWPGYNKAAGVYCIGEVLDGDPAYTCPYQEVLDGVLNYPIYYPLLNAFKSTSGSMDDLYNMINTVKSDCPDSTLLGTFVENHDNPRFASYTNDIALAKNVAAFIILNDGIPIIYAGQEQHYAGGNDPANREATWLSGYPTDSELYKLIASANAIRNYAISKDTGFVTYKNWPIYKDDTTIAMRKGTDGSQIVTILSNKGASGDSYTLSLSGAGYTAGQQLTEVIGCTTVTVDSSGDVPVPMAGGLPRVLYPTEKLAGSKICSSSGRGATSPGGSSGSVEVTFDVYATTVYGQNIYITGDVSELGNWTPANGVALSSANYPTWSATIALPADTTIQYKYVNIDGSTVIWEDAISNREITTPASGTYTEKDTWDES

SEQ ID NO: 169 - protein, 583 aa, Penicillium canescens
LTPAEWRSQSIYFMLTDRFGRSDNSTTAACNVSDRTYCGGTWQGIINHLDYIQGMGFTAIWITPVTEQLPQDTGDGEAYHGYWQQNIYEIDSKLGTAADLLALSKALHARGMYLMVDVVANHMGYAGSGNSVDYSVFNPFSSSSYFHSYCLISNYDDQSNVENCWLGDTIVSLPDLDTTQTAVQTIWYDWIADLVSNYSIDGLRIDTVKHVQKSFWPGYNDAAGVYCVGEIFDGDPAYTCDYQNYMDGVLNYPIYYQLLYAFQSSSGSISDLYNMINSVKSDCADSTLLGNFIENHDNPRFASYTSDYSQAKNVISFLFLSDGIPIIYSGQEQHYSGGADPANREATWLSGYSTTAELYKYIATTNKIRKLAVSDSSYLTTKNVPFYQDSHTLAMKKGSSASPVITVLSNYGSSGSSYTLSLSGSGYSSGTKLMEMYTCTSVTVDSSGNIAVPMASGLPRVLMLASSANSLCGSSGATSPGGSSGSVEVTFDVYATTVYGQNIYITGDVSELGNWTPANGVALSSANYPTWSATIALPADTTIQYKYVNIDGSTVIWEDAISNREITTPASGTYTEKDTWDES

SEQ ID NO: 170 - protein, 583 aa, Acidomyces acidothermus
LTPAQWRGQSIYQVLTDRFGRTDDSTTAACDVNDYCGGSWQGIINHLDYIQDMGFSAIWISPVVENLVGDTQDGSAYHGYWAQNIYALNPNFGTVSDLVALSAALHQRGMYLMVDVVTNHMGYDGCGDCVDYSVFTPFNSQSYFHPFCLIDYNNSTSIKVCWEGDNIVSLPDMRTEDSDVATEWNTWISELVSNYSIDGLRIDSAQQVDNAFFPPFQAAAGGIHVLGEVFNGDPNYVCPYQDFMSGVLNYPAYYYITQAFQSTSGSISNLVNGINQMKSTCTDTTLLGSFLENHDNPRFPSYTSDLSLDKNAITFTILQDGIPIIYEGQEQHYSGGTVPNNREAIWLSGYDKSAPLYTWIASVNQIRNQAIFKDSNYLTYMAWPIYSDASTIAMRKGFDGLQIISVYSNKGASAASYTISLESSTTGFTANEALVEVMSCTTYTTDGSGNLAVTISGGLPAVFYPKAQLAGSGICGATSPGGSSGSVEVTFDVYATTVYGQNIYITGDVSELGNWTPANGVALSSANYPTWSATIALPADTTIQYKYVNIDGSTVIWEDAISNREITTPASGTYTEKDTWDES

SEQ ID NO: 171 - protein, 586 aa, Kinochaeta ivoriensis
LSPAGWRQQSIYQVMTDRFARTDGSTIASCDTSQQAYCGGTWQGLINKLDYIQGMGFTAVWISPMVHQMAGATSDGESYHGYWAQDINTVNSAFGTAADLKALSAALHARGMYLMLDVVTNHFAYDGCGTCVDYSIFNPFNSESYFHPFCLIDYSNTTSIQVCWEGDNTVSLPDLRTEDSDVRSIWNSWISSVISTYGVDGLRVDSAQQVETSFWAGFEAAAGVYMVGEVFNGDPTYVTPFQDYMDGVLNYPAYYWITQAFESTSGSISNLANGMNTMKSLAKNTSLLGSFLENHDNPRFPSLTSDMSLAQNAIAFTMLMDGIPIIYQGQEQHFSGGGVPSDREAVWLSGYPNDTTLYAWITKLNAVRSWAIAKDSSYLAYMAYPVYTDTHTIAMRKGDTGYQVISVYTNVGASGSSYSVTLTSADTGFTASQSVVDLVGCKTYTADSTGSLSLSLTGGIPIILYPAASLTGNTICTSGATSPGGSSGSVEVTFDVYATTVYGQNIYITGDVSELGNWTPANGVALSSANYPTWSATIALPADTTIQYKYVNIDGSTVIWEDAISNREITTPASGTYTEKDTWDES

SEQ ID NO: 172 - protein, 585 aa, Aspergillus terreus
LTPAEWRSQSIYFLLTDRFGRTDNSTTAACDTSDRVYCGGSWQGIINQLDYIQGMGFTAIWITPVTGQFYENTGDGTSYHGYWQQDIYDLNYNYGTAQDLKNLANALHERGMYLMVDVVANHMGYDGAGNTVDYSVFNPFSSSSYFHPYCLISNYDNQTNVEDCWLGDTTVSLPDLDTTSTAVRNIWYDWVADLVANYSIDGLRVDTVKHVEKDFWPGYNSAAGVYCVGEVYSGDPAYTCPYQNYMDGVLNYPIYYQLLYAFESSSGSISDLYNMISSVASSCKDPTLLGNFIENHDNPRFASYTSDYSQAKNVITFIFLSDGIPIVYAGQEQHYSGGSDPANREATWLSGYSTSATLYTWIATTNQIRSLAISKDAGYVQAKNNPFYSDSNTIAMRKGTTAGAQVITVLSNKGASGSSYTLSLSGTGYSAGVTLVETYTCTTVTVDSSGNLPVPMTSGLPRVFVPSSWVNGSALCNGATSPGGSSGSVEVTFDVYATTVYGQNIYITGDVSELGNWTPANGVALSSANYPTWSATIALPADTTIQYKYVNIDGSTVIWEDAISNREITTPASGTYTEKDTWDES

SEQ ID NO: 173 - protein, 565 aa, Thamnidium elegans
VPLSVLDKRNGVTTLSKRAAAADWKSRSIYQLVTDRFGRSDGSTSACGDLSNYCGGDYKGIQNQLDYIAGMGFDAIWISPIPENTDGGYHGYWAKDFEKLNTNFGSADDLKALVTAAHGKGMYVMLDVVANHAGPASGGDYSGFTFSSASNYHPQCTIDYDNQTSVEQCWVADDLPDINTEDDTIVSKLHSIVSDWVTTYDFDGIRIDTVKHIRKDFWSGYEEAAGVFATGEVFDGDAAYVGPYQDQLSSLINYPLYYAIRDVFSAGSGFSRISDMLSTIKSNFKDPSVLTTFVDNQDNARFLSVKSDMSLYKNALAFTILTEGIPVVYYGTEQGFKGGDDPKNREVLWTSNYDTSSDLYKFIKIVNNDVRQKSDKTVTLDVDVGTNTYAFTHGKNLIVVNNYGSGSTESVTVKVGDSVADGTKLVDAVSNITATVSGGSITFSLKDGLPALFVPSSGATSPGGSSGSVEVTFDVYATTVYGQNIYITGDVSELGNWTPANGVALSSANYPTWSATIALPADTTIQYKYVNIDGSTVIWEDAISNREITTPASGTYTEKDTWDES

SEQ ID NO: 174 - protein, 574 aa, Meripilus giganteus
RPTVFDAGADAHSLHARAPSGSKDVIIQMFEWNWDSVAAECTNFIGPAGYGFVQVSPPQETIQGAQWWTDYQPVSYTLTGKRGDRSQFANMITTCHAAGVGVIVDTIWNHMAGVDSGTGTAGSSFTHYNYPGIYQNQDFHHCGLEPGDDIVNYDNAVEVQTCELVNLADLATDTEYVRGRLAQYGNDLLSLGADGLRLDASKHIPVGDIANILSRLSRSVYITQEVIFGAGEPITPNQYTGNGDVQEFRYTSALKDAFLSSGISNLQDFENRGWVPGSGANVFVVNHDTERNGASLNNNSPSNTYVTATIFSLAHPYGTPTILSSYDGFTNTDAGAPNNNVGTCSTSGGANGWLCQHRWTAIAGMVGFRNNVGSAALNNWQAPQSQQIAFGRGALGFVAINNADSAWSTTFTTSLPDGSYCDVISGKASGSSCTGSSFTVSGGKLTATVPARSAIAVHTGQKGSGGGATSPGGSSGSVEVTFDVYATTVYGQNIYITGDVSELGNWTPANGVALSSANYPTWSATIALPADTTIQYKYVNIDGSTVIWEDAISNREITTPASGTYTEKDTWDES

SEQ ID NO: 175 - protein, 671 aa, Chaetomium megalocarpum
LYINGSVTAPCDSPIYCQGEILKAIELARPFSDSKTFVDMPTIKPVDEVIAAFSRLSQPLSNNSELTAFLAENFAPAGGELEEVPISELETDPSFLNKLEDVDIKEFVGKVIDIWPDLTRRYAGPGNCSQCANSFIPVNRTFVVAGGRFREPYYWDSYWILEGLLRTGGAFTQISKNMIENFLDFVETIGFVPNGARIYYLNRSQPPLLTLMVKTYVDYTNDTSILERALPLLVKEYEFWTNNRTVSITATDGKEYTLNRYSVNNNQPRPESYREDYVTANNASYYAQSGIIYPVKTPLNETEKAELYSNLASGAESGWDYTARWLKTPDDAARDVYFPLRSLNVRSIVSVDLNSILYQNEVIISEYLEQAGNSSEAKRFADAAEQRSEAMYALMWNATHWSYFDYNLTDNSQRVFVPADADTAPSDQTAAPPGQQVLFDIAQLYPFWTGAAPASLKANPLAVQNAYARVARMLDTKAGAIAATNLRTGQQWDQPNVWPPLQHILMKGLLNTPATFGTEDPAYAHTQDLALRLAQRYLDSTFCTWYATGGSTSATPQLQGAAPGATGTMFEKYADDATNVAGGGGEYEVVEGFGWTNGVLIWAADVFGDRLVRPDCGNITAAHTHSSEKRTVAGASRPDAGASGVRRERRAVELDPWDAAWTKMFGRSKLR

SEQ ID NO: 176 - protein, 662 aa, Lecanicillium psalliotae
LYQNGSVIAPCDSPIYCHGDILKEVELARPFTDSKTFVDMPAKKPLAEIQAAFDKLEKPLSNNTALNEFLSTYFEDAGGELKAVSKDKLKTDAKFVDKLNDTVIKEFVNKVIDIWPDLTREYAGSATNCTNCPNSFIPVNRTFVVAGGRFREPYYWDSYWIVEGLLRTGGAFVDITKNTIENFLDLIEQFGFIPNGARLYYLNRSQPPLLSQMVKNYISYTNDTDILKRALPILVKEHEFFMNNRSVEITVENKTYTLNRYAVSNTQPRPESFREDYNTVNNNSYYAASGIIYPVKTPLNESEQATLYANLASGAESGLDYTTAKWSTNPRDSMEDIYFPLRSLNIMNIVPVDLNSILYGNEKAISEFYNITGNSSEADSWSKKAAERQEAIQAVFWNETLYSYFDYNRTSSSQHIYIPSDDDTQSFENATAPAGMQEVFTVTQFYPFWMGAAPDYIRNNPHAVKTAYSRIAKYLELKPGGIPSSNLRSGQQWDQPSVWPPLMHVLMKGLVNTPATFGKEDPAYKDVHKLALTLGQRYLDSTFCTWYATGGSTSETPQLSGLSDSDVGIMFEKYDDTSINHAGGGGEYEVVEGFGWSNGVLMWVADTFGNELKRPDCGNITAANVHPGKRSVSAVELSSRDAQRVKKFGRRAEGRMKVPGVL

SEQ ID NO: 177 - protein, 637 aa, Doratomyces sp.
LYTNGSIIAPCDSPIYCHGDILHQVQLAHPFPDSKTFVDMPAIKSVDEIQAAFDKLDKPLKNDTALQNFLAENFAEAGHELAEVDPSELSTDPRFLDKVSDTVIHEFTQKVIDIWPDLTRSYSPSGAGSDCPDCPNSFLPVNRTFVVAGGRFREPYYWDSYWIVEGLLRTGGDFLGVSRNIIENFLDFVDDFGFVPNGARRYYLNRSQPPLLSLMVKSYVEQTNDTEILDRAVPLLIKEYEFWTKNRTVEVPFGNETITLNQYNVDNTQPRPESYREDYITATNASYYSASGEVYEEVEKLNETQRATVYRNLATGAESGWDYTSRWMARPRDAVEDVYFPLRSLNIIEIVPVDLNSILYANELAIAEFVRLAGADDCEEEAAAWEALAEKRSADMHRLMWNDTLHSYFDYNLTSSSQNVYVPADNDTAPFERPGGTPEGSQVFFSAAQFYPFWTGAAPSSLRDDPAAVQLAYSRVASYLDLRAGGIPATNLRTGQQWDQPSVWPPLMHILTSGLLNTSPASASDDDDPSYAPTRDLALSLAQRYLDSTFCTWYATGGSTSETPQLDGFTDEDKGAMFEKYDDSATNVAGGGGEYEVVEGFGWTNGVLIWMVDTFGDELSRPDCGDIEAANAHPARK

SEQ ID NO: 178 - protein, 601 aa, Mucor moelleri
IQNHTSFSCDSPIYCEGDILHTVQLAKIFSDSKTFVDMPTSKSESQVIEAFKAIGGRNATIAQVQQFLNENFLTAGTEVKRLTNITIPELNWIDNITDPDYRGWISKLNQAWSNLTFTFDTSVLCQDCATSTLPVSRPFVVPGGRFREFYYWDSFFVIKGLLLSDQVELAKNMILNFFDFIDTYGFIPNGARIYYLNRSQPPFLTQMVEAFWEKTSDKEFMTNALPFLDKEYNFWMTNNSISVPDPKNPSKKYKMNHYVTLNTSPRPESYVEDYNTVNNGTDYSQAVKLQLYADIAAGAETGWDYSSRWTRQKHPAPNQTEGYEMLRSINTANIVPIDLNSLLWNTETMLAEWHDRFGEKSKSKKKSAYYQTQAKKRLDAMEKLMWNPTDYTYYDYNLTSSSQNLEFTPANLFPIWLGALPNKVMKNKTELARVFDETENALRKYPGILTTSYYNTTMQWDWPNGWPPLSYVAMEGMNKVEESLNGKKGSKQDGKTYTTSRGTSLARLSFTLAERYAASAYCGWYKTGGSIPGILNKIDGVADDGHMFEKFDVNTIGISGSQGEYVSQTGFGWTNGIALWIFDTYANLTAPDCNQTITLNI

SEQ ID NO: 179 - protein, 650 aa, Phialophora cyclaminis
LYINGSVIAPCDSPIYCHGELLKAIELARPFSDSKTFVDMPTRKPVDEVVAAFEKLSKPVVNDTKLGEFLQANFLPAGGDLSDFPPGSLETDPKFLDNINDTVIREFTEAVIDIWPDLTRRYVGASNCTGCANSFIPVNRTFVVAGGRFREPYYWDSYWIIEGLLRTGGNFVQISKNIIENFLDFVETIGFVPNGARIYYLNRSQPPLLTAMVKAYLEHTNDTKILDRAVPLLIKEYNFWITNRSVTLTGPDGNEYTLQRYSVNNNQPRPESYREDYNTANNKSYYSTSGIIYPENVSLNDSEKKELYANLATGAESGWDYGTRWLSRPADALRDVYFPLRYVKTRDLVPVDLNAILYQNEASISSFLYIQGNDTGAAHFAKLAAARQKAMTAVLWNATLFSYFDYNMTSSSHFSFIPVDDDATSIETATAPRGFQQIFHVAQLYPFWTGAAPASLRENPLAVQRAFSRVSQMLEEKAGSIPATNFYTGQQWDEPNVWPPLQHIIMEGLRNTPATFGEDDPIYQGVQDLALRVAQRYLDSTFCTWYATGGSTSLTPKLAGLTDNAKGIMFEKYGDNSTNVAGGGGEYEVVEGFGWTNGVLIWAVDTFGNKLKRPDCGDIQPAHVEARGLQRRAVELDKWDAQWVKRFGAK

SEQ ID NO: 180 - protein, 654 aa, Thielavia arenaria
LYINGSVIAPCDSPLYCHGDILKAIELARPFQDSKTFVDMPTIRPVEEVIAAFNRLSQPLSNNSELNAFLQANFAPAGGELEEVPESELSTNPVFLDKLNDTVIKEFVAKVIDIWPDLTRRYAGPGNCSECADSFIPVNRTFVIAGGRFREPYYWDSFWILEGLLRTGGAFTEISKNMIENFLDFVETIGHIPNGARIYYLNRSQPPLLAGMVKNYVDYTNDTSILERALPLLIKEYEFWTNNRTVQVTASDGKTYTLHRYNVNNNQPRPESYREDWITANNASYYAASGIIYPVKTPLNESEKAALYSNLASGAESGWDYGTRFLMRPEDAARDIYFPLRHLNVRDMVTVDLNAILYQNEVIISEYLEQAGNNTEAERFASAARQRSEAMYALMWNETLWSYFDYNLTSNSQYTFIPADVNATAAEKANAPEGQKVIFHIAQLYPFWTGAAPDQLKNNPLAVQKAYSRVAEMLDIKPGAIPATNFITGQQWDQPNVWPPLMHVLMAGLLNTPPTFGEDDPAYQAVQALALRLGQRYLDSTFCTWYATGGETSQTPRLQGVSPDATGTMFEKYADNAINVAGGGGEYEVVEGFGWTNGVLIWAADVFANGLKRPDCGNITAAHTHNGAKRAVELHPRDAAWTKKFGKRALKKRA

SEQ ID NO: 181 - protein, 661 aa, Thielavia antarctica
LYVNGSVTAPCDSPLYCQGEILKAIELARPFADSKTFVDMPTLRPLDDVIAAFRKLSQPLSNSSELNAFLAANFAPAGGELEEVPKSELRTKPAFLDKVEDVVIKEFVGKVIDIWPDLTRRYAGPGNCTECANSFIPVNRTFVVAGGRFREPYYWDSYWILEGLLRTGGDFTKISRNIIENFLDFVDTIGFVPNGARIYYLNRSQPPVLTLMVKTYVDYTNDTSILERALPLLIKEHEFWTTNRSVSVEVDGKTHTLNRYFVNNNQPRPESYREDWITANNASYYAASGIIYPVKTPLNGTQQAELYANLASGAESGWDYTSRWLKTPSDAARDVYFPLRSLNVINTIPVDLNSILYQNEVIISEYLEQAGNKSGAEKFSDAARQRSEAMYALMWNATNWSYFDYNLTSSGQNTHFPADADATAAETTSSPAGTQLLFSVSQLYPFWTGAAPQQLKSNPLAVTQAYARVAAMLDAKAGAIPATNLLTGQQWDEPNVWPPLQHVLMQGLLNTPATFGADDPAYQATQALALRLAQRYLDSTFCTWYATGGSTSATPRLAGVSAGAEGSMFEKYGDDSTNVAGGGGEYEVVEGFGWTNGVLIWAADVFAGKLQRPECGDIEAAQTHGGAARRGLGMERRAIELDPWDARWTKAFGKRALRRRA

SEQ ID NO: 182 - protein, 667 aa, Chaetomium sp.
LYINGSVTAPCDSPLYCQGEILKAIELARPFSDSKTFVDMPTIKPVDDVIAAFSRLSQPLSNNSELNAFLAENFAPAGGELEEVPESELETDPAFLDKLEDTTIKEFVTKVIDIWPDLTRRYAGPGNCSKCANSFIPVNRTFVVAGGRFREPYYWDSYWILEGLLRTGGAFTEISKNIIENFLDFVDTIGFIPNGARIYYLNRSQPPLLTLMVKTYVDYTNDTSILERALPLLIKEHEFWTNNRSVAITAADGKKYTLQRYYVNNNQPRPESFREDYITANNASYYAASGIIYPVKTPLNETEKAELYSNLASGAEAGWDYTARWLKTPNDAARDVYFPLRSLNVIGMVPVDLNSILYQNEVIIAEYLQQAGNSSEARRFATAAEKRSEAMYALMWNSTHWSYFDYNLTSNSQRIFVPTDADADPVDQTNAPPGHQVLFDIAQLYPFWTGAAPASLKNNPLAVQLAYARVAHMLDTKAGAIPGTNFRTGQQWDQPNVWPPLQHVLMKGLLNTPPTFGEADPAYQEVQRLALRLAQRYLDSTFCTWYATGGSTSDMPQLQGVNPGATGTMFEKYADNATNVAGGGGEYEVVEGFGWTNGVLIWAADVFGEGLTRPDCGNITAAHTHSGAKRGLDGGEGGAGGLWGRRAVELDPWDARWTKMFGRRKRE

SEQ ID NO: 183 - protein, 671 aa, Chaetomium nigricolor
LYINGSVTAPCDSPLYCQGEILRAIELARPFSDSKTFVDMPTIKPLEEVIAAFNQLTQPLSNNSELNTFLAENFAPAGGELEEVPKDELNTDPGFLDKLNDTTIREFVAKVIDIWPDLTRRYAGGGNCSECANSFIPVNRTFVVAGGRFREPYYWDSYWILEGLLRTGGAFIEISKNIIENFLDFVETIGFIPNGARIYYLNRSQPPLLTLMVKTYVDYTNDTSILERALPLLIKEHEFWVNNRSVEITAANGQTYTLNRYHVNNNQPRPESYREDYITANNGSYYAASGIIYPVRTPLNETEKAELYANLASGAESGWDYTARWLKTPNDAANDVYFPLRSLNVRGLVPVDLNSILYQNEVIIAEYLQQAGNLSLAQRFAEAAEQRSEAMYALMWNATYWSYFDYNLTSNSQRIFVPLDADSRTIETVGAPPGHQVLFDIAQLYPFWTGAAPANLKNNPLAVQQAYSRVASMLDAKAGAIPATNFRTGQQWDQPNVWPPLQHILMQGLLNTPPTFGDSDPAYQHVRDLALRLAQRYLDSTFCTWYATGGSTSDMPQLQGVSPDATGTMFEKYADNATNVAGGGGEYEVVEGFGWTNGVLIWAADVFGDALKRPDCGDIEAAHTHQAKKRDVEGLERRAVELDPWDAAWTKMFGRSKLRKRGAGGQKRWVS

SEQ ID NO: 184 - protein, 666 aa, Chaetomium jodhpurense
LYFNGSVIAPCDSPLYCQGEILKAIELARPFSDSKTFVDMPTIKPVDEVIAAFNRLSQPLTNNSELNAFLAENFAPAGGELEEVPKDELNTDPKFLDKLEDATIKEFVAKVIDIWPDLTRRYAGASNCSECANSFIPVNRTFVIAGGRFREPYYWDSYWILEGLLRTGGAYTQISRNMLENFLDFVETIGFIPNGARIYYLNRSQPPLLAMMIKNYVDYTNDTSILDRALPLLIKEHEFWINNRSVSITAADGKQYTLHRYNVNNNQPRPESYREDYITANNASYYAASGIIYPVKTPLNESEKAELYANLATGAESGWDYTARWLKTPNDAAKDVYFPLRSLNVRGMVSVDLNSILYQNEVIIAEYLERAGNISEAERFAAMAQQRSEAMYALMWNSTHWSYFDYNLTSNSQRIFVPLDDDSSTAEQANSPPGHQVLFDIAQLYPFWTGAAPESLKSNPLAVQLAYSRVARMLDTKAGAIPATNFRTGQQWDQPNVWPPLQHVLMAGLLNTPPTFGESDPAYQNVRALALRLAQRYLDSTFCTWYATGGETSQTPRLQGVSPDATGTMFEKYADNATNVAGGGGEYEVVEGFGWTNGVLIWAADVFADGLKKPDCGNITAAHTHSAKRGLERRAVELDPWDAAWTKMFGRSKLRKREEGRKRWLS

SEQ ID NO: 185 - protein, 670 aa, Chaetomium piluliferum
LYINGSVIAPCDSPLYCHGEILKAIELARPFSDSKTFVDMPTIKPLDEVIAAFSQLSQPLSNNSELNAFLAENFAPAGGELEEVSKDELQTDPTFLDKLDDTTIKEFVSKVIDIWPELTRRYVGSSDCSGCANSFIPINRTFVVAGGRFREPYYWDSYWILEGLLRTGGAFVDISRNIIENFLDFVETIGFVPNGARIYYLNRSQPPLLTLMVKTYVDYTNDTSILERALPLLVKEHEFWTTNRSVSITANGKEYTLNRYSVNNNQPRPESYREDYITASNESYYAESGIIYPVRTPLNETEKAELYSNLASGAESGWDYTSRWLKTPNDAANDVYFPLRSLNVLGLVPVDLNSILYQNEVILAEYFEQAGNSSEAERFAAAAEQRSEAMYDLMWNATHWSYFDYNLTSSSQRIFVPLDDGASTQEQSTSPPGYQVLFDVAQLYPFWTGAAPAALKSNPLAVQHAYSRVADMLNTKAGAIPATNFRTGQQWDQPNVWPPLQHIIMQGLLNTPPTFGESDPAYENTQSLALRLAQRYLDSTFCTWYATGGSTSDMPPLQGVSAGATGTMFEKYADDATNVAGGGGEYEVVEGFGWTNGVLIWAADVFGDALKRPDCGNITAASTHEGATKRDLRGLGRRAVELDPWDAAWTKMFGRAKLRKREQGRETWVN

SEQ ID NO: 186 - protein, 674 aa, Myceliophthora hinnulea
LYINGSVTAPCDSPIYCHGELLKGVELAHPFVDSKTFVDMPTLKPVDEVLAAFSKLRQPLSNNSELNNFLAEYFAPAGHELEEVPDSELQTDPKFLDKLEDRTIKEFVSKVIDIWPDLTRRYAGPGDCSDCANSFIPVNRTFVVAGGRFREPYYWDSYWILEGLLRTGGAFTQISKNIIENFLDFIDTIGFIPNGARIYYLNRSQPPLLTRMVKSYVDYTNDTSILERALPLLIKEHDFFTNNRSVSVTASNGKTYTLHRYHVENNQPRPESYREDYITANNGSYYAASGIIYPVKTPLNETEKAVLYSNLASGAESGWDYTARWLRVPDDAARDVYFPLRSLNVREIVPVDLNSILYENEVIIAGYLEKAGNSSEAKRFASAAKQRSEAMYNLMWNATHWSYFDYNLTSNAQNIFIPADEDTAPFDRTAAPPGKQVLFHIAQLYPFWTGAAPAHLKSNPLAVQKAYARVSRMLDSKKGAIAATNYRTGQQWDQPNVWPPLQHVLMQGLLNTPATFGESDPAYQGVQKLALRLAQRYLDSTFCTWYATGGSTSDFPQLQGVSPDATGIMFEKYADSAINVAGSGGEYEVVEGFGWTNGVLIWAADVFGNKLKRPDCGNITAAHTHSEAKRSLGDGGLARRAVELDPWDAAWTKMFGRSKLRRREAEDVRKRWSS

SEQ ID NO: 187 - protein, 659 aa, Chloridium virescens
LYINGSVIAPCDSPLYCQGDILKAIQLAQPFSDSKTFVDMPTTQPVDQVIAAFNQLPQPVSNNSGLQNFLSTYFAPAGGELTEVPKDQLQTNPMFLNKLNDTVIREFVTAVIDIWPDLTRTYTGASNCTGCSDSFIPVNRTFVVAGGRFREPYYWDSFWILQGLLRTGGAFTQISKNIIENFLDLVDQFGFVPNGARVYYLNRSQPPVLSEMVRTYVAYTNDTSILARAIPTLIKEHNFWMQNRTVNITGADGNTYTLNQYHVENTQPRPESYTEDYITANNHSYYATSGIIYPETKPLNDSEIANLYANLASGAESGWDYGSRYLARPNDAAQDVYFPLRSLNVLNIVPLDLNSLLYQSEQNIALFLQATGNSSEAEQWTSLAAQRQTAIHALMWNETLWSYFDYNLTSNGQNIYVPADKDATPADTASAPPGYQVLFDVAQFYPFWTGAATDELRRNPLAVRQAFTRVDAYLTAKAGGIPATNLMTGQQWDQPNVWPPLMHVLMQSLLDTPATFGAADPSYAALQGLALRLAQRYLDMTFCTWYATGGSTSQTPKLQGLGPDAVGTMFEKYADNATNIAGSGGEYTVVEGFGWTNGVLIWAADTFGAQLTRPNCGNITAAHVTPGKRSVGLGRRAVELHESDARWVKMFGSRAWRNA

SEQ ID NO: 188 - protein, 662 aa, Gelasinospora cratophora
LYVNGSVTAPCDSPIYCYGELLHQVELARPFSDSKTFVDMPTIKPVDEVLEAFSKLTLPLSNNSELHEFLNTYFGPAGGELEAVPTDQLHVSPTFLDNVSDDVVKQFVNSVINIWPDLTRKYVGAGEICTGCANSFIPVNRTFVVAGGRFREPYYWDSFWILEGLLRTGGAFTEISKNTIENFLDLVEQIGFVPNGARLYYLNRSQPPLLTQMVRIYVEHTNDTSILERAVPILKKEWEWWITNRTVEVTADGKTYSLQRYHVDNNQPRPESYSEDYITANNNSYYATSGIIYPETTPLNDTQKAQLYANLASGAESGWDYSTRWLKNPNDAARDVYFPLRSLNVLEIVPVDLNSILYQNEVTIGKFLAQQGNKDEAEEWAKKAEQRSEAMYKLMWNSTLWSYFDYNLTSSSQNIYVPADPQVFPFEKPSGTPEGYQVLFSINQMFPFWTGAAPDQLKANPLAVKLTFDRVKNYLDNKAGGIPATNFVTGQQWDEPNVWPPLMHVLMDGLLNTPATFGEDDPAYQETQNLALRLAQRYVDSTFCTWWATGGSTSETPKLQGLGSDAKGIMFEKYADNSTNVAGGGGEYEVVEGFGWTNGVLIWAADKFGDKLKRPNCGDLTPANVGKRAVELDAFDAKFTKKFARKGKLEKLKAKFKRRAAI

SEQ ID NO: 189 - protein, 543 aa, Acidobacteriaceae bacterium
QTTTTSAGLHDTLAYIKRTWHTLERSNKTLLKSADDVKVGQAGTLTLYVSQDVKPQAVNASLRRELPPADKKRIVVRQLPEHPEAVEPAGLLYLPYPYVVPGGRFNEMYGWDSYFILLGLVHDDELALAKNMTDNFIYEIEHYGMILNANRTYYLTRSQPPFLTQMILEVYRRTGDGKWLASTLPAIEKYYAYWMREPHLTPETGLSRYWGGADTPAPEVVHGEKDAAGHNQYDRVREYYRTHNVTAYDVSQYYDKATDRLKPLFYIADRAMRESGFDPSSRYGPFSADIIHYDPVCLNSLLYRMESDTATILKQLNRTSEARVWEKRATQRAELVNRLMWNEEKGLYFDYDFITRRQSNYHFVTTFYPLWAGIASRQQADRVRKNLSIFERAGGLQTSDYISGSQWDAPFGWAPLQIMTVEGLRRYGFNEDADRISRKFINMVVRDFEEHGTIKEKYDVVIGKSDLAAGLKFGYTSNEAGFGWTNAAVVLFIEELAGERPLAASLDRESMPMLRQRHLSPQPSVWPPFSPQAPQYRRRDPYR

SEQ ID NO: 190 - protein, 532 aa, Acidobacterium capsulatum
GARSSLSPHAVAGPQPIDAYIHTAWSTLTRSMSDCKSVADPKLKSTPVLYLPRDLAVPANVAAMQKQCHVRVLRLPIVITHFDQIRESQIATPGLLYLPHPYVVPGGRFNEMYGWDSFFILKGLLDDHHIALARGIVENFFFEIAHYGGILNANRTYYFTRSQPPFLSSMIRAIYAAEVAEGHTQAAHAWLVEAYPYAVRDHALWMSPIHQAGNTGLARYFDTGQGPVPEMADDSTYYQDVIRWLLAHPGLHTGYLMHGSPHLDAAARERLAQLSCDPTLSKVCARAHVHGYWLTRSFYKGDRAMRESGFDTTFRFGPFSGSTQHFAPVGLNALLYKYERDLAWMAAQLGKPGEAAKWNSEAETRRAEMNHYLWNAQKKMYFDYNFETHRQSSYAFITTFYPLWAGAADKAQQQGVIASLPLFEHPGGLAISNHDSGVQWDLPYGWAPTEWMAVQGLLRADDQHDARRIASEFNRTVRTTYQHDHAIYEKYDVVNRSNDFRVTAGYTQNVVGFGWTNAVYLEFQSLLAHPGQ

SEQ ID NO: 191 - protein, 568 aa, Acidovorax wautersii
AAAVSSGLRISERHPAYSTNPARVQVPGAPGAPPSDHCTPADRYQELFVAVQSQQIFEDSKTFVDCGPIGEPEDILAAYRAEHAQPDFDLARFVAQHFTAPQVAANDYVGAPGMALAEHIDALWPVLTRKPEDHPVRGSALPLAHPYVVPGGRFAELYYWDSYFTMLGLAATGRSELVQCMTDNFARLIDAFGFVPNGTRTYYLSRSQPPLFAAMAELGALVGGPPVSHYLPQLLQEHAWWMDGLHVLHPGEARRRVVALPGGEILNRYWDDRDTPREESWREDIETASAVDRPSADVYRDLRAAAESGWDFSTRWLRAPDAANPASLHLSQICTTDLLPVDLNAFLYRMEVSIAKASQSAGDRATATHFHDLAAHRREAVNRLMWNEAEGAYFDYDWRRGELRGCLTAATVVPLYAGMATEAQAAAVARAVRTHLLAAGGLATTVCSSDQQWDRPNGWAPLQWMAVRGLERYGHKDLALEVRQRWIETVRSVYQREGKLVEKYAVGNGDGAPLCGGGGGEYPLQDGFGWTNGVVQCWLDPRYDTYAAAQTVYYGPTDDGTADSLPEA

SEQ ID NO: 192 - protein, 529 aa, Xanthomonas arboricola
APMDTPVVNAPAATPPTPDLAYPELFQAVQSGELFDDQKHFVDFLPLRDPALINADYLAQHDHPGFDLRKFVDANFEESPPVQTDAIRQDTALREHIDELWPKLVRSQTHVPPYSSLLALPHPYVVPGGRFREVYYWDSYFTMLGLVKSGETTLSRQMLDNFAYLIDTYGHIPNGNRSYYLSRSQPPFFSYMVELQAGVEGEAVYQRYLPQLRKEYAYWMQGSEDLQPGQAARHVVRLADGSLLNRYWDERDTPRPEAWLHDTRTAAEAGDRPAAEVYRDLRAGAESGWDYTSRWLADGQNLRTIRTTAIVPIDLNSLLYHLERTLAQACAQPGAECAQDYAALALRRKQAIDAHLWNAAGYYADYDWQTRKLSDQVTAAALYPLFTGLATDAHAKRTASTVRARLLRPGGLATTAVKTGQQWDEPNGWAPLQWVAVDGLRRYGEDALARTIGERFLTQVQALFAREHKLVEKYGLEADAAGGGGGEYALQDGFGWTNGVTLMLLNLYPDTATKPAPAKRARKPEAAAR

SEQ ID NO: 193 - protein, 540 aa, Kosakonia sacchari
AEAQNTPQPPDILLGPLFSDVQTAKLFPDQKTFADAVPKGDPLMILADYRMQRMQTSFDLRHFVDVNFTLPKEGEKYVPPEGQNLREHIDGLWPVLTRTTDSAGKWDSLLPLPKPYVVPGGRFREVYYWDSYFTMLGLAESGHWDKIEDMVTNFAHEIDTWGHIPNGNRSYYLSRSQPPFFSLMVELLATHDGDEALKTWLPQMEKEYQYWMEGADTLQPGQANKRVVKLSDGSVLNRYWDDRDTPRPESWLDDVTTAKNNPNRPATEIYRDLRSAAASGWDFSSRWMDDPNQLGTIRTTSIVPVDLNALMFKMEKMLARGYQAAGDSAKASQYDALANARQKGIEANLWNEKEGWYADYDLKTKKVRNQLTAAALYPLFVNAAAKDRADKVASAAKERLLKPGGIATTTVNSGQQWDAPNGWAPLQWVATAGLQNYDQQKLAMEVSWRFLTNVQHTYDREKKLVEKYDVSTTGTGGGGGEYPLQDGFGWTNGVTLKMLDQICPKEKPCDSVPQTQPAQQPAAKVEPTSQPSKQQQAVAQ

SEQ ID NO: 194 - protein, 532 aa, Enterobacter sp.
DEQPAFQKNSPDILLGPLFNDVQSAKLFPDQKTFADAVPKSDPLMILADYRMQHTQSSFDLRHFVEMNFTLPAEGEKYVPPAGQSLREHIDDLWPVLTRTTDKASNKWDSLLPLPKPYVVPGGRFREVYYWDSYFTMLGLAESGHWDKISDMVDNFAWEIDTFGHIPNGNRSYYLSRSQPPFFSMMVELLATHDSDALKKYRPQMEKEYAYWMEGVDSLQPGQANQRVVKLDDGSVLNRYWDDRDTPRPESWLDDVNTAKNNPNRPATEIYRDLRSAAASGWDFSSRWMDDPQKLGTIRTTSIVPVDLNALMFKMEKLLARASQEAGDSAAASKYEALATARQKAIENHLWNDKEGWYADYDLKSKKVRNQLTAAALFPLYVKAASQERADKVAAATSARLLKPGGITTTTINSGQQWDAPNGWAPLQWVATEGLQNYGQNKVAMDVTWRFLKNVQHTYDREKKLVEKYDVSTTGTGGGGGEYPLQDGFGWSNGVTLKMLDLVCPKEKPCDSVPENQPAANDEAAPVKASAQ

SEQ ID NO: 195 - protein, 720 aa, Saitozyma flava
QNPASSSSFSPTPVTTMVPSPTAALNATVPGQGVYPPLQAWCNNGGNDTFCPGVLLQDVQLSGIFPDSKTFVDKPTRGTLNETLRTFASLGNNLTVGQIEGFVNNSFKGEGLELSQVALEGFNPNPAFLDTISDPIYQGWMSVVNSYWTLLIRETNRSALCNGDCESSLIPLNNTIVVPGGRYREIYYWDSYWILIGLLESELTAYATDLISNFMDFIQTYGFIPNGGRKYYLNRSQPPVFTQMLNTYVQRTGNTSILARGLPLAHQELVWWENNRVISVTSPYSNITRRVAHFAVNNTAPRPEGYVEDYETAFGASPALNETARGQLYSDLAAGAESGWDYSSRWCKQPVINLTDNFPALRTINTAKIIPVDLNSLLAGDHTLLANLYELYGNSSNANTSVTSNSSQLVPYHRQLAKNYSDAVLDLHWDAQKAWFYDFNLTANARADIYHPGGTFALWQNITPPAVASNETYALEVVSGARFLLGKYTSIPSVSTLIETGLNWDFPNSWPPHVYSSIKAFETLGRAFPNASVLSNISIPFSDVQKNQLGLDESAIPAQPASTIGNSTSQIAEAQGKPWPQALSIEYANRYMQAAFCSWYSTGGSIDGLLTQLPLSELNMTGTFQAGTTGVMFEKFNVTDLDAAGGGGEYKVQIGFGWTNGVALWLGANFGQYLPQPTCPLIPIIEVQNGMNSSVYQNGTMTNSTKTQSYIFQGHRIPRK

SEQ ID NO: 196 - protein, 723 aa, Phaeotremella skinneri
QTPTSSSSSSFSATPVSTSVPSPTVPLNSSVIGQGLYPPAQAWCNGGMNDTFCPGVLLQDVELSGIFADSKTFPDKPTVGTLNSTLQAFAALPANVTVGEIETFVNQYFKGEGLELEQVAIEGFVANPAILNNITDPVFKGWVSTVNGYWQLLIRQTNESSLCNETSCASSLIPLNHTIVVPGGRYREIYYWDSFWILQGLLKSELYTYSWDLLQNFMDLIETYGFLPNGGRKYYLNRSQPPVFIQMLDAYIKVTGNSSILARALPIATTELAWWSSNRTIPVTSPYTGITHLVAHYAVTNSAPRPEGYVEDFTTAMGASPALNDSARAELYSELASGAETGWDYSSRWCRQPLLNLTDNNPALRTLNVKAIIPVDLNSLLAGDHALLANLYDLYSNSSSSNSTSNSSSISNSSSQAAYHRQAAQNLTAAILDLHWSPSKSFFYDFNTSSNSQSDIYTPASLFPLWQNITPPALVGNETAALQLVSGVRYLLGKYAGIPSVATLLATGLNWDFPNSWPPHVYTSIKAFQTLYRVNPNATVLSNLTLSFAQVQAGQLGLSETGFQIQPASTVGNTSLETAEAKGKPWPVALGIEYANRYMQSAFCSWYSTGGEISGVLTQLPLSDLNSTGTFTAGQTGVMFEKFNVTDPDAAGGGGEYTVQTGFGWTNGVVLWVAGEFGSLLPAPTCPLIPIIEISGSSNSSIYANGTVTNSTALYRGYKIPRK

SEQ ID NO: 197 - protein, 663 aa, Trichoderma asperellum
LYTNGSVIAPCDSPIYCHGDILQDIQLAHPFSDSKTFVDMPAKRPLREIQSAFNNLSKPLTNDSSLQVFLETYFADAGGELVEVPRSSLTTNPAFLNKINDTVIREFVTKVIDIWPDLTRRYSGAVGNCSTCPNSFIPVNRTFVVAGGRFREPYYWDSYWIIEGLLRTGGAFVGIAKNTIENFLDFIDRFGFIPNGARLYYLNRSQPPLLSQMVRIYIEHTNDTSILKRALPLLVKEHDFWIRNRTISVNIANKTYTLQQYAVQNTQPRPESFLEDYVTANNRSYYATSGIIYPENKHLNSTEMADLYANLATGAESGNDYTSRWLANPSDAINDVYFPLRSLNNKEIVPVDLNSILYGNELTISQFYNRTGDATAARAWAERAANRSAAIQAVFWNETLFSYFDYNLTSSSQYVYVPADKDTISLDRQTAPSGKQVFFHVGQFYPFWTGAAPDYVKNNPYAVTRAYDRVTGYLDAQPGGIPASNVQTGQQWDQPNVWPPHMHILMQGLNNVPATFTAQDPSYQDIQNLSLRLGQRYLDFTFCTWLATGGSTSETPKLHGLSDQDVGIMFEKYDDNSTNAAGGGGEYEVVEGFGWTNGVLLWTADTFGNKLKRPQCGNITAGHPAPASSSSKRSAVQLDAWDARRVKKFGKRTEGRVKRPFLF

SEQ ID NO: 198 - protein, 674 aa, Corynascus sepedonium
LYINGSVTAPCDSPIYCQGELLKAVELARPFVDSKTFVDMPTIKPVDEVLAAFSKLSLPLSNNSELNAFLYENFAQAGHELEEVPDSELETDAKFLDKLEDRTIKEFVGKVIDIWPDLTRRYAGPSNCTECANSFIPVNRTFVVAGGRFREGYYWDSYWIVEGLLRTGGAFTHISKNIIENFLDFVDTIGFIPNGARIYYLNRSQPPLLTLMVKSYVDYTNDTSILDRALPLLIKEHEFFMNNRTVSITGSNGKEYTLNRYHVENNQPRPESFREDYITANNGSYYASSGIIYPVKTPLNETEKAALYSNLATGAESGWDYTSRWLGVPSDAARDVYFPLRSLNVRDIVPVDLNSILYQNEVIIAEYLEKAGNSSAAKRFATAAEQRSEAMYSLMWNATHWSYFDYNLTDNTQHIFVPADEDTAPQDRIEAPPGQQVFFHIAQLYPFWTGAAPASLKANPLAVQQAYARVARMLDIKKGAIPATNYRTGQQWDQPNVWPPLQHILMKGLLNTPATFGKSDPAYQSVQNLALRLAQRYLDSTFCTWYATGGSTSDFPQLEGVTPGATGVMFEKYADNATNVAGTGGEYEVVEGFGWTNGVLIWAADVFGNKLKRPDCGNITAAHTHSSAKRGLEENKLPRRAVELDPWDAAWTKMFGRSKLRRREAEDVRKRWMS

SEQ ID NO: 199 - protein, 674 aa, Myceliophthora thermophila
LYINGSVTAPCDSPIYCHGELLKGVELAHPFVDSKTFVDMPTLKPVDEVLAAFSKLRQPLSNNSELNNFLAEYFAPAGHELEEVPKGELQIDPKFLNKLEDRTIKEFVSKVIDIWPDLTRRYAGPGDCSGCANSFIPVNRTFVVAGGRFREPYYWDSYWILEGLLRTGGAFTQISKNIIENFLDFIDTIGFIPNGARIYYLNRSQPPLLTRMVKSYVDYTNDTSILERALPLLIKEHDFFTNNRSVSVTASNGKTYTLHRYHVENNQPRPESYREDYITANNGSYYAASGIIYPVKTPLNETEKAVLYSNLASGAESGWDYTARWLRVPDDAARDVYFPLRSLNVREMVPVDLNSILYENEVIIAEYLEKAGNSSEAKRFASAAKQRSEAMYNLMWNATHWSYFDYNLTSNAQNIFVPADEDTASFDRYAAPPGQQVLFHVAQLYPFWTGAAPAHLKSNPLAVQKAYARVSRRLDTKKGAIAATNYRTGQQWDQPNVWPPLQHVLMQGLLNTPATFGESDPAYQGVQKLALRLAQRYLDSTFCTWYATGGSTSDFPQLQGVSPDATGIMFEKYADSATNVAGGGGEYEVVEGFGWTNGVLIWAADVFGNKLKRPDCGNITAAHTHSEAKRSLGDGGLARRAVELDPWDAAWTKMFGRSKLRRREAEDVRKRWSS

SEQ ID NO: 200 - protein, 661 aa, reesei GH37
LYINGSVIAPCDSPIYCHGDILREIELAHPFSDSKTFVDMPAKRPLSEIQTAFANLPKPLRNDSSLQTFLASYFADAGGELIQVPRANLTTNPTFLSKINDTVIEQFVTQVIDIWPDLTRRYAGDAAVKNCSSCPNSFIPVNRTFVVAGGRFREPYYWDSYWIVEGLLRTGGAFVGIARNTIDNFLDFIERFGFVPNGARLYYLNRSQPPLLSRMVKVYIDHTNDTAILRRALPLLVKEHEFWTRNRTVDVRVNNKTYVLNQYAVQNTQPRPESFREDFQTANNRSYYAASGIIYPATKPLNESQIEELYANLASGAESGNDYTARWLADPSDAMRDVYFPLRSLNNKDIVPVDLNSILYGNELAIAQFYNQTGNTTAAREWSSLAANRSASIQAVFWNETLFSYFDYNLTSSSQNIYVPLDKDAVALDRQTAPPGKQVLFHVGQFYPFWTGAAPEYLRNNPFAVTRIFDRVKSYLDTRPGGIPASNVNTGQQWDQPNVWPPHMHILMESLNSVPATFSEADPAYQDVRNLSLRLGQRYLDFTFCTWRATGGSTSETPKLQGLTDQDVGIMFEKYNDNSTNAAGGGGEYQVVEGFGWTNGVLLWTADTFGSQLKRPQCGNIMAGHPAPSKRSAVQLDMWDASRVKKFGRRAEGRMGTLHAW

SEQ ID NO: 201 - protein, 670 aa, Chaetomium virescens
LYINGSVTAPCDSPLYCQGEILKAIELARPFSDSKTFVDMPTIKPLEEVIAAFGRLKQPLSNNSELTAFLAENFAPAGGELEEVPKSELHTDPVFLNKLDDAVVKEFVGKVIDIWPDLTRRYAGPGNCSNCENSFIPVNRTFVVAGGRFREPYYWDSYWIVEGLLRTGGAFVGITKNILENFLDFIETIGFVPNGARIYYLNRSQPPLLTKMIKIYVDHTKDTSILQRALPLLIKEHEWWTNNRSVTVTGPNGKTYTLNRYHVNNNQPRPESFREDYITANNGSYYATSGIIYPVKSPLNETEKDETYANLATGAESGWDYTARWLRTPNDAAKDVYFPLRSLNVRNMIPVDLNSILYQNEVIIGEYLEQAGNKSEAQRWFQAANQRSEAMYALMWNATHWSYFDYNLTSNSQYIFIANDEDATTAEQANSPPGQQVLFSISQLYPFWTGAAPDQLKKNPLAVQQAYYRIERMLNEKAGAIPSTNFRTGQQWDEPNVWPPLQHILMQGLLNTPATFGTADPAYAAVQNLALRLAQRYLDSTFCTWYATGGSTSQTPQLQGVSPGATGIMFEKYADNATNVAGSGGEYEVVEGFGWTNGVLIWAAETFGNKLKRPDCGDIQAAHTHTDKKKRWSVDGEVRARERMAVELDPWDAKWTKMFGQAKGRVGRRS

SEQ ID NO: 202 - protein, 508 aa, Rhodothermus marinus
QDRVACQVPLPSVERIEAVRAYIRQSWDVLTRSHRDLLAAVQDPKIEHEPGTPWPLYIAATEDSVAVWHRLQQELPDSVLQQIVLRVLPEDPVAHLDEIHPHGLLYLPEPYVVPGGRFNEMYGWDSYFIVVGLLRDGRVDLAKAMTDNHLYQVRHYGKVLNANRTYYLTRSQPPFLSAMVLAVYAHTQDRDWLAAAVPLIERYYAYWTTPPHLAGETGLSRYYDLGEGPAPEVVAGERDAQGRTHYDRVREYYRMHEVTAYDESLYYVAEADSLTPLFYKGDRSMRESGFDPSNRFGPFSVDIIHYAPVGLNALLYRMETDLARIHEILGDTAAAAAWRARAEARRERVDRYLWDSERGLYFDYNFRTGRRSDYVFATTFYPLWVGMASPEQAARVAANLYLLEAPGGLLTSTHISGSQWDAPYGWAPLYLIAVEGLRRYGYDEAADRLTAKFVSMIVEDFERTGVILEKYDVVQRRSDVALRYGYTSNEIGFGWTNAVFAELLAQMD

SEQ ID NO: 203 - protein, 674 aa, Myceliophthora sepedonium
LYINGSVTAPCDSPIYCQGELLKAVELARPFVDSKTFVDMPTIKPVDEVLAAFSKLSLPLSNNSELNAFLYENFAQAGHELEEVPDSELETDAKFLDKLEDRTIKEFVGKVIDIWPDLTRRYAGPSNCTECANSFIPVNRTFVVAGGRFREPYYWDSYWIVEGLLRTGGAFTHISKNIIENFLDFVDTIGFIPNGARIYYLNRSQPPLLTLMVKSYVDYTNDTSILDRALPLLIKEHEFFMNNRTVSITGSNGKEYTLNRYHVENNQPRPESFREDYITANNGSYYASSGIIYPVKTPLNETEKAALYSNLATGAESGWDYTSRWLGVPSDAARDVYFPLRSLNVRDIVPVDLNSILYQNEVIIAEYLEKAGNSSAAKRFATAAEQRSEAMYSLMWNATHWSYFDYNLTDNTQHIFVPADEDTAPQDRIEAPPGQQVFFHIAQLYPFWTGAAPASLKANPLAVQQAYARVARMLDIKKGAIPATNYRTGQQWDQPNVWPPLQHILMKGLLNTPATFGKSDPAYQSVQNLALRLAQRYLDSTFCTWYATGGSTSDFPQLEGVTPGATGVMFEKYADNATNVAGGGGEYEVVEGFGWTNGVLIWAADVFGNKLKRPDCGNITAAHTHSSAKRGLEENKLPRRAVELDPWDAAWTKMFGRSKLRRREAEDVRKRWMS

SEQ ID NO: 204 - protein, 657 aa, Moelleriella libera
LHTNGSLIAPCDSPIYCYGDILKQVELARPFADSKTFVDMPGVKPLAEIQAAFDKLEKPLRNNTALQDFLKTYFADAGQELQEVPKSELKTDPQFLKTLNDTVIREFVTKVIDIWPDLTRSYKGSNTNCTDCPNSFIPINRTFVIAGGRFREPYYWDSYWILEGLLRTRGSFTQIAKNTLENFLDFVEQFGFVPNGARIYFLNRSQPPMLSQMVKLYIDHTNDTAILQRALPLLVKEHAWWMNNRTVDVQVGGKTYKLNRYAVSNTEPRPESYREDFETASNSSYYAQSGIIYPETKKLNDSQRAVLYANMATGGENGWDFSSRWIANPSDSVRDVYFPLRTNNAQNVVPVCLNSILYGNEMTIGGFFNSTGNTTAGQEWAAKAKARSEAMHATMWNETHFSYFDYNLTSSAQDVYTLADDDTSIYDNGTLTGAPPGYQVAFNGAQFYPFWQGAAPTYLKENPQAVKTAYARVAQYLKVRKGGIPATNLKAREQWDQPNVWPPLMHILMQGLLNTPPTFGSSDPSYKSVRSMALTLAQRYLDSTFCTWYATGGSTSETPKRPGLPEKDKGIMFEKYADNSIDIAGSGGEYEVVEGFGWTNGVLIWAADTFANELKRPDCGNGSSSSSTSSAAKRGLSAVELHPADASRIKRFGSSKG

SEQ ID NO: 205 - protein, 660 aa, Acremonium dichromosporum
IYVDGNITAPCDSPVYCYGEMLHQIQLAKPFDDSKTFVDMPALKPLSQIQAAFDRLDKPLSNNSALNNFLDEFFADAGGELSEVDKADLETDPVFLDKIDDEVVKEFTNKVIDIWPDLTRRYSGAAASNCTNCPSSFIPLNRTFVVAGGRFREPYYWDTYWIIEGLLRTGGSFTDISRDIIENFLDFVDQFGFVPNGARIYYLNRSQPPVLSRMVQAYIEHTNDTDILDRALPLLMKEHEFFSENRTIDIEGPNGTTYTLNRYDVRNNQPRPESYSEDYETATNTSYYSHDSGIIYPETEPLNDTERANLYSALASGAESGWDYSSRWIARPRDAAEDVYFPLRSLNTNNIVPVDLNSIMYANEMAIAGFLNQTGNASAAAEWEELAYNRSEAIHALMWNETYMSYFDYNLTSAAQHIYVPADDDVSTLESSTAPEGHMVLFSVSQFYPFWTGAAPSYIKNNPFAIAQIYKRVETLLDTRKGGIPATNFRTGQQWDQPSVWPPLMHILMAGLQNTPATFGEDDPAYQHVHEIALRIGQRYLDSTFCTWRATGGATSETPQLEGFTDRDVGIMFEKYADNSTNIAGGGGEYEVVEGFGWTNGVLIWTVDEFGNELKRPDCGDLEAADTTERRKRSALQLAPRDAQRTKKFGKRAVERQPWF

SEQ ID NO: 206 - protein, 667 aa, Fusarium sambucinum
LYVNGTVVAPCDSPIYCHGDILEQVELARPFSDSKTFVDMPAIRPLSEIQKAFDELDKPLRNNSALADFLSENFADAGNELEEVPEDELKTDPKFLDNINDTVIREFTEKVIDIWPDLTRRYDQDSKNCSDCPNSFIPVNRSFVVAGGRFREPYYWDSYWIIEGLLRTGGSFVNIAKNTIENFLDFIEEYGFVPNGARIYYLNRSQPPLLSQMVKIYIDHTNDTDILERALPLLVKEHEFFMKNRSVPVYINDETYMLNTYNVSNTQPRPESYREDYITATNKSYYSTSGEVYSGGEELSFKQKETLYGNLASGAESGLDYTSKWIARPENAIRDNYFPLRYLNTRNIIPVDLNSILYGNEIAIADFYEQTGNSSASEQWREVAANRSYAMHAFMWNETLWSYFDYNLTSKAQQIYFPADNNTVSVDTEDAPKGQQVFFSPTQFYPFWLGAAPDYLKNNPYAVLSAYKRVATYLDKREGGIPASNIETGQQWDQPNVWPPMMHILMAGLEKVPATFGIMDPSFIEIRKLALRLGQRYLDSTFCTWYATGGSTSETPKLESVSDKEDGIMFEKYADNATNTAGGGGEYEVVEGFGWTNGVLIWAVEEFGNRLTRPKCKNLETAHSSDKRDTSAVMLHARDAKHVKKFGRRKRAEEKAAKKRSSRLFHF

SEQ ID NO: 207 - protein, 660 aa, Phoma sp.
LYQNGSIIAPCDSPIYCYGDLLREIELAQPFSDSKTFVDLPTIRPLDEVLRAFNNLTKPIQNNTELNNFLTTYFGEAGSELDALPKDQLETQPDFLDNVNSSVIVNFTSQVIDIWPDLTRRYVGAGNCTGCVSSFIPVNRTFVVAGGRFREPYYWDSFWIIEGLLRTKGSFTQIAENIIENFMDLVEELGFVPNGARRYYENRSQPPLLTQMVRVYVEYTQNYTLLERALPVLEQEYEFWVNNRSVTLERGGKNYTLHHYNVSNTQPRPESYREDYITANNLTYYNENGEQFNASHPLNDTQKALLYAELASGAETGWDYSSRWLANPSDAVNDDFFPLRSLNVINTIPVDLNSILYYNEITIAEFHRREGNYCAARQWAELARNRSEAMTALLWNAEYYSYFDYNLTSSAQNIYTLADNTSTPLSLAGAPAGYQVGFQLSQLYPFWTGAAPDSIKGDPTAIRRAFARVEEALDTEAGAVSATNLFTGQQWDEPNVWPPLQYIAIQGLLNTPLEVSEDDDEQTAEDYVWTQNLALRLAQRYTDSLFCTWRSTGGATEEEPQLPGATGNGTIFEKYSDEAINARGGGGEYTVVEGFGWSNGVLIWAVDNFGQKLTTPDCGNITAAAPPSTASKRKRSAVEIHQRDAAWIKGTKENKMFGKK

SEQ ID NO: 208 - protein, 737 aa, Lentinus similis
LPQAVTPSSTSVSSQTVSTAVPSPTASLTSTLPSQIPLPPKQDWCPSEIFCAGELLQTVNVAQLYPDPKTFVDKPTARKSQQVVSNFQNIGGNSSNVTVGAIEDFVNSNFKGEGLELEPIAFANFNPTPAFLNNVSDPLVKAWSQIVHGYWTQLTRSTNDSALCPEGTESGSCESSLIPLNHTFVVPGGRFREQYYWDSYWIVQGLLVSELYDIVNDTLQNFMDELEHIGFIPNGGRIYYLNRSQPPLFIHMLTSYVQASGDTSILKRALPLAEKELAWWSANRSVQVKSPYTNATHNVYRYHVTNTAPRPESYYTDYITANDPTLQTPLTEQQRADLYAELATGAESGWDYSSRWLKEPLAGGSNNTSPALRSLNIRSLVPVDLNSILYKAHLNLAALYNNESHSAAASNHTQAAIALREAILDLHWDANKRAFYDFNITSNARNDIFSAATFYPLWSGIIPDEILSDGSGATAFGAFAAVNMVLNRYNGTFPVTFLETGLQWDAPNAWPPHQFIIIEALRNLPSNITNTPLPSAPSGNSTYALIPAGQVGIAEGDLPGQILSPGQNATKTGPAADINTLNGTVVNGGNATSGEGWAAVLQRELANRYIASALCSWHATGGEVPNLLPRLSDSQLQITQSQNNTGNMFEKFSINDIDSAGRGGEYTVQAGFGWTNGVVLYLTHVFGDKLVAPSCPNLVALSSNTATTSGAVAQMTLPSSLAVTVGAVVLGFVGLVL

SEQ ID NO: 209 - protein, 683 aa, Diaporthe nobilis
QTLDGIYYDGDNIAPCSSALYCYGDILDSIQRAKPFADSKTFVDMPTRVPLEEVRAAYDQLTKPLQNNTELLDFLSNNFGPAGQEVVPVDPGSLGVNASFLGGIANAVNREFTEAVIDLWPNLTRWVNESAVCAECDNSLLSIKRPFIVAGGRFREPYYWDSYWILHGLLRSGGNFTRIARNQIENFLDFVEDYGFVPNGARVYYLNRSQPPLLAQMVRIYIEQTGDATILDRAIPLLIREHDFFMSNRTVHVSVGSRNYTLNRYNVANTEPRPESYYEDYTQVNNASYYANDGRVFPTRNTTQAEKDLQYKNLASGAESGWDFSTRFMRDPTIAANDTYFPLASYNIINIIPVELNSILYWNEVTIAAFLRQQQQQVPNATAEADADAWDARAASRSEAMYSVMWNETLGGYFDFNLTSGSQDVFWARDADSLPTEQAGTEPGQQVVFNIGQLSPFWTGAAPRSLAGDPAAVRRAFSRVDEYLGSRKGGIAPTNFVSGQQWDQPSVWPPHMHILMEALLRTAEAGGESEGGSEDWAWAQDLALRLGQRYFDSAYCTWRATGGGTPSSPPLANPPQDLGGQMFEKYSDQSLNEAGSGGEYVVVVGFGWSNGVLIWVADTFRDRLQTPACGDLTTRGEAGKMREKRMSENGRHGDGSNAISAVKLDYFDAAWTSENVGGLHGVR

SEQ ID NO: 210 - protein, 763 aa, Solicoccozyma terricola
QGNSSMSASNATSSSTGTGTSSSAAAVMTAVPMPTAPLSSPVEMLPLPPVQPWCNGGENATYCPGSLMQLVQLSGIYNDSKTFPDKPTQYNASVTYQAFDALPVNATVGDVETFVEKYFKGEGQELETVQIQNFTQNPTFLNVIDDELYKGFVSTVNGYWSLLVRQTNESALCTNGACESSLIPLNRSFIVPGGRYREIYYWDSFWILEGLLKSELYLYAYNLLENFMDLIEKFGFLPNGGRSYYLNRSQPPVFVQMLNAYIQVTGNVSILTRALPIAETELQWWRTNRTISVTSPYTGTNYSVARYFVTNSAPRPEGYVEDITTAFGGNPALNESARSALYAELASGAETGWDYSSRWCKQPLLNLTDNDPALRTLNVRQQIPVDLNSLLCGDHVLLANLYEFYMNSTIGGGSGISSGGGNSTIGMGAWANSTSGSNMTSNSTSSSNMTGLVQSHRMIAKEFEAAINDLMWDKQKLWWYDFNMTANARADVYHPGGLFPLWQNITPSDIVGNDTAAFGVFAGVRYMVGMYPGPPAPASLIQTGLNWDAPNVWPPHVYTGIKALETVLRINPNSSVVPNITLTDFTRIPTGQLGLNQSQLPPQPASALGNGTADLDQAIAQMQKGKPWPTALAIEFANRYLQSAFCSWYSTGGSIPGLLQQLSPQELNLTGSLTTGSQAMGNIFEKFNLTNVDAAGGGGEYTVQIGFGWSNGVILHTAGEYGQYLVQPSCPLIAIHETANATSTNATKSNNTMVFSGYRLPHD

SEQ ID NO: 211 - protein, 734 aa, Dioszegia cryoxerica
QSSSSSSFSPTPVTTAVPSATAALNQTVSGQGVYPPLQPWCNAGENATYCPGVILQDVQLSGLFPDSKTFVDKPTNGTQNATQQAFQQLGNNITLGQLAQFVNTSFRGEGLELSQVPINGFVANPAAVNKVSNPLYRGWVSTVNSYWSLLIRETNQSAVCTTQCESSLIPLNYTIVVPGGRYREIYYWDTFWILEGLLKSELYTYAWDVLQNFMDFVDVYGFIPNGGRKYYLNRSQPPVFIQMLDAYVKATGNVTILERALPLASEEMRWWINNRTTQVTSPFTGITRRVYVFNVTNSAPRPEGYVEDYEAAFGAQPPLTEAQRGALYAELATGAESGWDYSSRWCKQPVINVTDNLPALRTLNGRSIVPVDLNSLQAGNHALLARLYEVYINASTTSNTTAAQTIRANATQEIALHKTLANDYSQAVLDLHWDPARAWFYDFNLTSNSRESLYTPAGTFALWQNITPPGLEGNDTAALRIASGARYLLGRYGGIQGVSSLLVTGLNWDFPNSWPPHTYTSIKAFQTLGRLVGNASIVGNATIPFSQVATNQLGLNETQLPPQDPALQGNASLTVPSARNVSWPLALEIEYASRYMQGAFCSWYSTGGSISGLLTQLPVSQLNATGTYQAGQTGQMFEKFNATDIDAAGGGGEYTVQIGFGWTNGVVLWLADNFGQYLPQPTCPLVVLSLTNLNSTTAGNSTNGTSPAAPGNATSLVAVSELQGIWEGQRVSRD

SEQ ID NO: 212 - protein, 1020 aa, Talaromyces funiculosus
LPFNERVDQVLRSYEVTSKLDSRSTKPSKHGHTYQTQFLGVTWDQRNWRLQSTVLDQGHYESRGSIANGYIGLNVAGAGPLFELDSPVDGDVINGWPLFSRRQTFAGLAGFYDLQPRTNGTNFPWLSQYGDDSAISGVPHWGGMVLDLGDGEYLDATVDNSTISDYTTTYDYKAGVLSWDYKWTPKNANGSFGISYKIFANKLDVNQAVVQLSITPSTNGSASVVNVIDGYAAVRTDFVSSGNESDVVYTAVKPNGVTNVTAWIYTALDGDDAFDISSAALVNDKPYVHQNDSSIAQSVNVTFTAGTTITINKFVGAASTDAFPDPQSTAREAALSARRRGFDDLFRSHISEWAQVMPDDSVDDFTLANGTLPNDTFIIESAVMAVVNPYYLLQNTVGPNALRRVNNAPVNDWSIPVGGLTSDSYAGQIFWDADVWMQPGLVAAFPESAKRITNYRAAKYSQALENAKTAYTSSQNQTWFSPDAAIYSWTSGRVGNCTATGPCWDYEYHLNGDIGISLVNEWVVSGDNETFKNKHFPIYNSIATLYGDLLKKNGSYYTLTNMTDPDEYANNVDAGGYTMTLISQTLSNANAFRKQFGMNENTTWTEMADNILLIRENDVTLEYTTMNNSVAVKQADVILSTFPLDYTKNYTTSAALNDLDYYALKQSPDGPGMTYAIFSIVANDVSPSGCSAYTYAQYSYDPYIRGPFFQFSEQLLDDYTINGGTHPAFPFLTGHGGANQVVLYGYLGLRLLPDDMLHIDPNLPPQIPSIKYRTFYWRGWPIQAASNYTHTTIQRATTVAPLSTADPTYANKSIHVSVGHNTVNSTTYSLSANGSALVVPNRQIGSINTVAGNVVQCKSVLSTDAYQKGQYPISAVDGAASTKWQPEFAANISSLTVDLTGSNVSSVSGFYFDWAQAPPTNITVLLHNSSSAALASSGDKPGSSAVTLNITISNPYNASTYNANIIALPSSNSTNYTFPAPVPKPRYATLFVQGNQALDETDTKSGNGTGATVAEWAILS

SEQ ID NO: 213 - protein, 1063 aa, Hamigera avellanea
ASPKSRINQCLKKHAGQGSHDDETSSNVYQTRFPGVTWDEDNWSLTTSVLDQGHYQSRGSVANGYLGINVASVGPFFELDIPLNGDVINGWPLYSRRQTFATISGFFDSQPETNGTNFGWLNQYGGESVISGVPHWSGLILDLGDGTYLDSTVDNATLSGFTSSYDFKAGVLSWSYQWTPEGKHGSYDITYRLFTNKLYVNQAVVDMEIVPTVAGKASVVNVIEGSSAVRTDFVESGEDDGAIFSAVRPWGISNVTAYFYANLTVSDNVDLSSRTLVSNKPYVSTNESSIAQSVDVQFIPGKSVRITKFVGAASTDAFANPQETAKRAASTAQTNGYLKSLNSHIAEWASVMPDDSVEDFSLPETGKLPADEHIIESAIISVTNTYYLLQNTVGKNAIKASSDAALNMDSISVGGLTSDSYAGLIFWDADIWMQPGLVASHPEAAEVFTNYRVAKYPQAVKNIETAFASSKNQTNFSPSAAAYPWTSGRYGNCTGTGPCFDYQYHLNGDIGLSMINQWVVSGDTQTFREKHFPIYDSAATFFSNLVERNGSTWTLTNMTDPDEYANHIDAGGYTMPLIAETLLYANSFRKQFGVEPNETWNEIAENVLVLRTNGVTLEFTSMNGSAPVKQADVVLVTYPLDYNNNYSPEDSLNDLDYYANKQSEDGPAMTWAIFSVVANEASPSGCSAYTYAQYAYYPYARAPFFQLSEQMIDDASINGGTHPAYPFLTGHGGANQVNLMGYLGLRLLPDNVIHVDPNLPPQIPHLKYRTFYWRGWPMSAASNYTHTTIQRAVNVPALSTADQKFANVSIPVHVGPETNATVYRLPVNGTLTIPNRQIASKNTVAGNLIQCRPVESQNDFQPGQFPISVVDGASSTRWQPKHADNVSAVTVTFADEEVGSLVSGFYFDWAQAPPVDAAVIFHNSSLENPASAFSFASNSSSSEYSVITTLKNVEQSDPYDPESDKLDIIAIPTGNTTKVTLPSAVPAARYATLFITGNQALGPEDIAAKNGTGATVAEWAIVGQTSSATSKRSIQTRKLQVRSGAALSGLGFAQRRRQSAEMY

SEQ ID NO: 214 - protein, 1020 aa, Talaromyces ruber
LPFNERVDHVLRSHDLTSRLHSRSAKPSNHGGTYQTQFTGVTWDQRNWRLQSNVLDQGHYESRGSIANGYIGLNVAGAGPFFELDTAVDGDVINGWPLFSRRQTFAGLAGFYDLQPTTNGSNFPWLDQYGDDSVISGVPHWGGLVLDLGNGEYLDATVDNSTISDYSTTYDYKAGVLSWHYKWTPKNANGSFEIKYKIFANKLDVNQAVVQLSITPSANGSASVANVIDGYSAVRTEFVASGNESDAIFTAVKPVGVSNVTAWIYAALDGDDAFDFSSATLVNDKPYVHQNDSSIAQSVNVTFTAGTTITINKFVGAASTDAFPDPQSTAREAALKARRRGFDDLFRSHISEWAQVMPDDSVDDFTLANGTLPNDPFIIESAVMAVVNPYYLLQNTVGPNALRRVNNAPVNDWSIPVGGLTSDSYAGQVFWDADVWMQPGLVAAFPESAKRITNYRTAIYSQALENAKTAYTSSQNQTSFSSDAAIYSWTSGRYGNCTATGPCWDYEYHLNGDIGISLVNQWVVSGDNDTFKNTHFPIYNSIATLYGDLLKKNGSYYTLTNMTDPDEYANNVDAGGYTMTLISQTLSNANAFRKQFGMDENTTWTDMADNVLLIRENDVTLEYTTMNNSVAVKQADVILSTYPLDYTKNYTTSAALNDLDYYALKQSPDGPGMTYAIFSIVANDVSPSGCSAYTYAQYSYDPYIRGPFFQFSEQLLDDYTANGGTHPAFPFLTGHGGANQVVLYGYLGLRLLPDNVLHIDPNLPPQIPSVKYRTFYWRGWPIQAASNYTHTTIQRATSVAPLSTADQTYANRSISVQVGQNTVNSTTYSLPANGSAIVVPNRQIGSINTVAGNIAQCKSVLSTDAYQPGQYPISAVDGAASTKWQPEFAANISSLTVDLTSSNASTVSGFYFDWAQAPPTNITVLLHNSSNAPLTSSNSNGGNSTVSLNVTISNPYDASAYNANVITLSSSNTTNYTFPAPVSKPRYATLFVQGNQALDETDLKAGNGTGATVAEWAVLS

SEQ ID NO: 215 - protein, 1055 aa, Trichoderma lixii
ATSNNRVSECLGRNGGSSTGVHFSKNVYKTDFAGVTWDEDNWLLSTTELKQGAFESRGSIANGYLGINVASVGPFFELDTEENGDVISGWPLFSRRQSFATIAGFWDSQPVMNGTNFPWISQYGSDTAISGIPHWSGLILDLGGNTYLDATVDNRTISNFRSTYDYKAGVLSWSYKWTPKGNKGSFDISYRIFANKLYVNQAVVDLQVTASKNVEASIVNVIDGFAAVRTDFVESGEDGNAIFSAVRPNGVANVTAYVYADITGSGGVDLSSRKIVHNKPYVHANASSIAQAVPVKFSAGRAVRVTKFVGGASSDAFKNPKQIAKSAAATALKNGYSKSLNSHVTEWAAVMPESSVDSFADPKTGKLPNDNYIIDSAIIAVVNTYYLLQNTVGKNGSKAANGAPVNVDSISVGGLTSDSYAGQVFWDADLWMQPGLLAAHPEAAERIINYRLARYGQAKENVKTSYAGSQNETFFSASAAVFPWTSGRYGNCTATGPCWDYEYHLNGDIGLALVNQWVVNGDTKDFEKNLFPVYDSIAQLYGNLLKPNGTAWTLTNMTDPDEYANHVDAGGYTMPFIAETLQNANTFRKQFGIEQNKTWNDMASNALVLRENGVTLEFTTMNGSAVVKQADVIMVTFPLSYTTNYTTEDALNDLDYYANKQSPDGPAMTYAFFSIVANEISPSGCSAYTYAQYAFKPYVRAPFYQLSEQIIDDSSINGGTHPAYPFLTGHGGANQVVLFGYLGLRLVPDDFIHIEPNLPPQIPYLRYRTFYWRGWPISAWSNYTHTTISRASGVAALDGADQRFAGKTITIHSGPEESPKAYHLPVKGSVVVPNKQIGSQQTYAGNLVQCHAASSPSDYVPGQFPIAAVDGATSTKWQPASADKLSSITVSLDQEDVGSLVSGFHFDWAQAPPVNATIIFHNEAINDPATVLKSQKHNSNYKVVSSLTNIKQSNPYIKTTDLDIIAIPIGNTTNVTLSQPVAASRYASLVIVGNQGLDHADVVGKNGTGATVAEWAIIGHSKGHTGAPGHHGKRKLNLRAAAAMSDPDSFARRRQ

SEQ ID NO: 216 - protein, 1056 aa, Aspergillus cervinus
STFSHKNDRILKGLKRHGDHYSRKSNTNSTDVYQTKFDGVTWDDDNWLLTTTALDQGDFRSRGSIANGYLGINVASVGPFFELDTAENGDVISGWPLFSRRQTFATIAGFFDSQPTTNGSNFPWLYQYGGDSVISGVPHWSGLVLDLGNDTYLDSTVDNQTIENFTSMYDYKSGVLSWSYTWVPAGNKGSFDIVYRLFAHKLNVNQAVVDMEITPSLSFNATVVNILDGYSAVRTDFVESGNDNGAIFTAVRPWGISNVTAYVYANLTGTPNVDLSSRTIVANKPYVHTNASSIAQAVNVSCSPNETVRITKFVGAASSDAFENPQETARQAVSAAIGAGYLRSLGTHIAEWASIFPDDSVDRFTDPATGKLPANKHIINSAIIAVTNTYYLLQNTVGKNAIQAVSGAPVNIDSISVGGLTSDSYAGQVFWDADVWMQPGLAASHPEAAQRITNFRAAKYPQALANIETAFTSSKNQTSFSPSAAAFPWTSGRFGNCTATGPCWDYEYHLNGDIGLSLMYQWIASGDTQTFRETHFPIYDSIATMYSNIVERNGSYWTLKNMTDPDEYANQIDAGGFTMPLISQTLNYANAFRQQFGLDVNQTWSEIANNVLVLNDNGVTLEYTTMNGSTVVKQADVVLDTYPLVYSNNYTSQNSLDDLDYYANQQSPDGPAMTWAIFSIVANDVSPSGCSAFTYHQYSYDPYARAPFFQLSEQLIDDASTNGGTHPAFPFLTGHGGANQVVIFGYLGLRLLPDEAIHIDPNLPPQIPHVAYRTFYWRGWPISAQSNSTHTTISRAMNASPLDTADSRFANVSIPIYVGTESNATVFQLPPTGPLTILNRQNGFNNTIPGNVAQCRPVYSPDDYAPGQFPIAAVDGATSTRWQPSSANTSSVTVTLPDTQINSPVSGFYFNWWQLPPVNATVIFHDDLLENPAATISSSGNSSSYRVVMTLTNIQQSSPYNAQIAALDEITIPTGNTTTVQLTNHAQTSRYATLLISGNQGLGDTQDGVGATVAEWVILGQGQGSSSSNSNGKRKLGARSAAALSNGWTERRRRLI

SEQ ID NO: 217 - protein, 1053 aa, Rasamsonia brevistipitata
LRSEARVAQVVRAYSSSTGVEAGHGNATQYETRFPGVTWDQRHWRLKSTVLDQGHFQSRGSIANGYVGINVASAGPFFELDTPVDGDVINGWPLFSRRQTFATIAGFYDEQPRTNGSNFDWLYQDGGESVISGVPHWSGLILDLGDGTYLDATVDDSTISDYSTVYDYKAGILSWSYKWTPKSSKGSFKISYRLFAHKLNINQAVVRMEITPSADTDATVVNVLDGYSAVRTDFVGSGKDGDAVYSAVSPWEVQNVTAYVYAVLDGSDGVDLSTLSLVNGKPYVHTNESSIAQSVNVRFRAGKTVTVTKFVGAASTDAFPDPQQTAREAALAAKEEGYDALLRSHVAEWAAVMPEESVDDFTYHNGTLPGDDFIVESAIMAVVNPYYLLQNTVGENALREVSHAPVNEWSISVGGLTSDSYAGLIFWDADLWMHPGLAVAFPQAATRITNYRVAKYEQARQNAKTSFTGSKNQTWFSDSAAVYPWTSGRYGNCTGTGPCWDYEYHLNGDIGLSLINEWVASGDTKTFQESYFPIYDSIATLYADLLQQNGSHWTLTNMTDPDEYANAVDAGGYTMPLIAQTLLYANSFRQQFGAQPNSTWTEMASNILFLRENDITLEYTTMNNSVQVKQADVVLVTYPLEYTTNYNAGNALTDLDYYALKQSPDGPAMTYAIFSIVANEVSPSGCSVYTYAQYSYDPYVRPPFFQLSEQLVDDYTLNGGTHPAYPFLTGHGGANQVVIFGYLGLRLLPDNVIHIDPNLPPQIPQVKYRTFYWRGWPIQAYSNYTHTTIGRAADVLALDTADQRFANTTIPVQVGSGSNATVYQLPIDGVLTVANRQVASTNTVAGNLAQCQPVDSSDSYVPGQYPLAAVDGAASTKWQPSFAANVSSVTVSLPESESGTLVSGFYFDWAQAPPVNATVVFHNNTVENPTRYMSSPTFVTHIDNITLSSPYNAEANPAATILLPSSNTTNVTLAHPMPVPRYATLFITGNQALSESEVQAQNGTGATVAEWAILASNPETGSSKRNLQLRGVGRSALAGLPRRANRKERRTDV

SEQ ID NO: 218 - protein, 1034 aa, Acremonium curvulum
LEERVSQTLNRHGVRSSYNRRADNGDQNRISNTSHPYIYQTSFEGVTWDSRNWRLQGTVLDQGHYQSRGSIANGYFGINVASAGPFFELDTPVDGDVINGWPLFSRRQTFAGLAGFWATQPTTNGTNFPWLYQYGDESPISGIPHWGGLVLDLGDDVYLDATVDNKTIKNYRTTFDYKAGVLTWDYTWSPKKRGSGSFDITYSLFANKLDINQAAVRLSIRPSRDTKAKVVNVLEGYAAVRTDFVDSGKDGDAIYSAVRPVGVNNVTAYVYAVLDADSAVDLSSAKVIDDAPYLYTNKSTIAQSVNVEFKANQNVTITKFVGIASTDAFPKPRDVAKQAAFAGKRRGYDDALRSHVSEWAQVMPDDSVDDFSSDNGTLPDDGFIIESSIMAVVNPFYLLQNTVGANALRRVNNAAVNDYSISVGGLTSDSYAGLVFWDADIWMQPGLAAAFPEAAQRITNYRVALYPQAKRNIKTAFQSSKNKTRFSDDAALYPWTSGRWGNCTASGPCFDYEYHLNGDIGIAFVNEWITSGDEKAFEEKYFPIYDSIATAFANLLQKNGTQWTLTNMTDPDEYANHVDAGGFTMPLISQTLTYANLFRKKFGKEENDTWADMAENVLILRENDVTLEYTAMNNSVEVKQADVVLNTFPLDYTRDYAPSAALNDLDYYALKQSPDGPAMTYAIFSIVANEVSPSGCSAYTYAQYSYSPYLRGPFHQLSEQLTDDFTTNGGTHPAYPFLTGHGGANQVVLFGYLGLRIVPDDKIHVDPNLPPQIPQVKYRTFYWHGWPIAAKSNYTHTTISRATTIKELDTANKKYANASIQVVVGSGKSAKTYKLPANGSSIVVANRKIGTVNTLEGNMIQCQPAQSFDTFVPGQFPISINDGAASTKWQPEFANNISAVTVTVPASKSKKISGFYFDWAQAPPTNATVVLHDEKMDNPTMVLLPVSKDDDKKGSVARVNVTISEPWSAKDKSNFVIGLQGGNTTNFTFSEPVAAKRYATLFIQGNQALDKVDIKYKNGTGATVAEWGILSDDA

SEQ ID NO: 219 - protein, 1015 aa, Talaromyces piceae
ARVDQVLQARDTHHPSLHSSSSYQTRFDGVTWDQRNWRLQSRVLDQGHYQSRGSVANGYLGINVASAGPFFELDTPVDGDVINGWPLFSRRQTFAGLAGFYDRQPTTNSTNYGWLNQYGDESVISGIPHWSGLVLDLGDGHYLDATVDSSTISDYTTTYDFKAGVLSWDYNWAPRQHGGGNSSFHISYQLFAHKLDINQAVVKLSITPSASGNASVVNVIDGYSAVRTEFVKSGTDGDAVYSAVSPVGVSNVTAWVYTVLDGDEAFNLSSAQLVTGKPYVYQNDSSIAQSVNVEFRAGETVTITKFVGAASTDAFADPRQTARDAALLAKKKGFDDLLRSHVSEWAQVMPDGSVDDFTREDGTLPDDEFIIESAVTAVVNPFYLLQNTVGKNALQRVSNAPVNDWSIPVGGLSSDSYAGLIFWDADVWMQPGLVAAFPESAQRITNYRAAMYRQARANIQSAFASSQNKTVFSPDGAIYPWTSGRYGNCTGTGPCFDYEYHLNGDIAISLVNQWVVSGDTETFKNEHFPIYDSIATMYADVLKKNGSFYTLTNMTDPDEYANNKDAGGFTMPLIAKTLLNANDFRKQFNMEENSTWNEKAASVQILRENDVTLEYTTMNNSVAVKQADVVLMTFPLDYTANYSSSSALNDLDYYALKQSPDGPGMTYAIFSIVANQVSPSGCSAYTYAQYSYYPYARAPFFQLSEQLLDDYTANGGTHPAYPFLTGHGGANQVVLYGYLGLRLVPDETLYIDPNLPPQIPQVKYRTFYWRGWPIQAASNYTHTTIRRATTVAPLDTADEKYTDEAITLHVGQQSDGNKYQLPADGTPVTVANRRVSSVNTVKGNMIQCQPVQSTASIQPGQFPIAAVDGAASTKWQPEFAANASSLTVEIPSSGKKRKTVSGFFFDWAEAPPTNATVVLHNNPVSEPTLSSFEAGKDGVVLRAFDIEISSPYNASTYADEIIIPQGNSTNYTFSHPVPAPRFATLFVQGNQALDKVDVENKNGTGPMVAEWVILE

SEQ ID NO: 220 - protein, 1022 aa, Penicillium sp.
LPLEERVDRVLRSYSVGSGLEARHSKYTYQTQFDGVTWDQQNWRLESTVLDQGHYSSRGSIANGYIGLNVAGAGPFFELDAPVDGDVINGWPLFSRRQTFAGLSGFYDVQPTTNGSNYPWLDQYGYDSVISGIPHWGGLVLDLGNGDYLDATVDNSTISDYTTTFDYKAGVLSWDYNWTPKNTSFGISYKIFSSKLDINQAVVQLSITPSANGTASVANVIDGYAAVRTEFVTSGNDSDALFTAVKPTGINNVTAWIYAVLDGDDAFDFSSATLVNNKPYINQNDSSIAQAVDVEFTADSTVTITKFVGAASTDAFADPQKTAKDAALAARIKGFEDLLRSHVSEWAQVMPDDSVDDFSLADGTLPDDIFIIESSVMAVVNPYYLLQNTVGENALRRVNDAPVNIWSIPVGGLTSDSYAGQIFWDADLWMQPGLVAAFPESAKRISNYRVAKYPEALANTNTSFAGSQNHTTFSSDAAIYSWTSGRYGNCTATGPCWDYEYHLNGDIGISLVNQWVTSGDTETFQNDLFPIYNSVATLYADLLKLNGSYYTLTNMTDPDEYANNVDAGGYTMTLISKTLSNANAFRKHFGLDQNSTWTEMAENVLVIRENDVTLEYTTMNNSVAVKQADVVLSTFPLDYTMNYTTSDAVNDLDYYALKQASDGPGMTYAIFSIVADKVSKSGCSAYTYAQYSFDPYIRSPFFQFSEQLDDDYTTNGGTHPAFPFLTGHGGANQVVLYGYLGLRLLPDNVLHIDPNLPPQIPSVKYRTFYWHGWPIQANSNYTHTTIRRATTTAPLSTADQTYSNTSITVQVGTSNGTTYSLRVDGTPLTIKNRRIGSVQTISGNIAQCQPVQSPDSYEPGQYPLSVVDGASSTKWQPESAANISSVTVTLGSSYSPGNSSNATASSILGFYFNWAQAPPDNITVVLHNASIPYLNASLSSLSNTTTTTSLNITVSNPYDSSADEKIIVLPSSNTTNYTFPSPVPVPRFATLFIQGNQGLDQTDLEYGNGTGATVAEWAILSA

SEQ ID NO: 221 - protein, 1020 aa, Talaromyces aurantiacus
LPFQDRVDQVLRSYSAKTLDIRSAKSSSKHGNTYETQFPGVTWDQRNWRLQSTVLDQGHYESRGSIANGYIGLNVAGAGPFFELDTPVDGDVINGWPLFSRRQTFAGLAGFYDLQPTTNGSNFPWLDQYGDDSAISGVPHWGGLVLDLGDGQYLDATVDNSTVSDYKTTYDFKAGVLSWDYKWTPKSSNVSFGISYKVFANKLDVNQAVVQLSITPSANGSASVVNVIDGYSAVRTDFVSSGNESDAIYTAVKPLGVSNVTAWIYATLDGDDAFDFSSATIVNNKPYVHQNDSSIAQSVNVTFTAGTTVTINKFVGAASTDAFPDPRSTAKEAALAGRRRGYDDSFRAHISEWAQVMPDDSVDDFTLANGTLPNDTFIIESAVMAVVNPYYLLQNTVGPNALRRVNNAPVNDWSISVGGLTSDSYAGQVFWDADVWMQPGLVAAFPESAKRITNYRAAIYSQALANAKTAYTSSQNQTSFSSDAAIYSWTSGRYGNCTATGPCWDYEYHLNGDIGISLVNQWVASGDNETFKNTHFPIYNSIATLYGDLLKKNGSYYTLTNMTDPDEYANNVDAGGYTMTLISQTLSNANAFRKQFGMDENTTWTEMADNVLLIRENDITLEYTTMNNSVAVKQADVILSTYPLDYTKNYTTSAALNDLDYYALKQSPDGPGMTYAIFSIVANDVSPSGCSAYTYAQYSYDPYIRGPFFQFSEQLLDDYTANGGTHPAFPFLTGHGGANQVVLYGYLGLRLVPDDKLHIDPNLPPQIPSVKYRTFYWRGWPIQAASNYTHTTIQRATRVAPLSTADMTYANKSISVQVGQNTANSTTYSLPVNGSALVISNRQIGSINTVQGNIAQCKSVQSMNGYQPGQYPISAVDGAASTKWQPEFAANVSSLTVDLTSSNASSVSGFYFDWAQAPPVNVTVVLHNSTSASLTSSAAQNGSSTVSLNITISNPYNASSYDANVIELSSSNTTNYRFPAPVPKPRYATLFVQGSQALDETDMKAGNGTGATVAEWAILS

SEQ ID NO: 222 - protein, 1016 aa, Talaromyces pinophilus
LPFNERVDQVLRSYSPKNLESRSTKHGNSYQTQFSGVTWDQRNWRLQSTVLDQGHYESRGSIANGYIGLNVAGAGPFFELDTAVDGDVINGWPLFSRRQTFAGLAGFYDLQPTTNGSNFPWLSQYGDDSAISGVPHWGGLILDLGDGEYLDATVDNSTISDYTTTYDYKAGVLSWDYKWTPKNSKASFGINYKIFANKLDVNQAVVQLSITPSANGSGSVVNVIDGYSAVRTDFVSSGNESDVIYTAVKPVGVNNVTAWIYAALDGDEAFDFSSAELVNDKPYVHQNDSSIAQSVNVAFTAGTTITINKFVGAASTDAFPDPQSTAREAAMTARRRGFDDLFRSHVSEWAQVMPDDSVDDFTLANGTLPNDTFIIESAVMAVVNPYYLLQNTVGANALRRVNNAPVNDWSIPVGGLTSDSYAGQIFWDADVWMQPGLVAAFPESAKRITNYRTAKYSQALENAKTAYTSSQNQTSFSSDAAIYSWTSGRYGNCTATGPCWDYEYHLNGDIGISLVNQWVVSGDNETFKNTHFPIYNSIATLYGDLLKKNGSYYTLTNMTDPDEYANNVDAGGYTMTLISQTLSNANAFRKQFGMDENTTWTEMADNILLIRENDVTLEYTTMNNSVAVKQADVILSTFPLDYTKNYTTSAALNDLDYYALKQSPDGPGMTYAIFSIVANDVSPSGCSAYTYAQYSYDPYIRGPFFQFSEQLLDDYTANGGTHPAFPFLTGHGGANQVVLYGYLGLRLLPDDMLHIDPNLPPQIPSVKYRTFYWRGWPIQAASNYTHTTIQRATSVAPLSTADPAYANTSISVSVGQNTANSTTYSLPVNGSAIVVPNRQIGSINTVAGNIAQCVSVLSTDAYQPGQYPISAVDGAASTKWQPEFAANVSSLTVDLTSSNASSVSGFYFDWAQAPPTNITVLLHNSSSAALTSSSTHGGSSSVSLNITISNPYDASSYDANVIALSSSNTTNYTFSAPVAKPRYATLFVQGNQALDETDTKAGNGTGATVAEWAILS

SEQ ID NO: 223 - protein, 1069 aa, Talaromyces leycettanus
TSANARINRCVKKHAGGKTPSGPSNNTYQTRFPGVTWDQDNWCLSTTTLDQGHYESRGSVANGYLGINVASVGPFFEFDTPVDGDVINGWPLFDRRMSFATISGFWDQQPTTNGSNFPWLYQYGGESVISGVPHWSGLILDLGDNTYLDATVDSRTISGFSTTYDFKSGVLSWSYQWTPAGNMGSYNITYRLFAHKLYVNQAVVDMEVVSSTEAKATVVNVIDGASAVRTDFVESGQDDGAIYTAVRPWGIANVTAYIYANITGSDNVDMRSRALVTNKPYVNGNASSITQAVNVHFTPGKSVRITKFVGGASSDAFSNPQQIAKQACSTAQANGYVKSLRSHVAEWASVMPDDSVDDFTFPSNGTLPADEYIIESQIISVANTYYLLQNTVGKNAINASSSTELNKDSIAVGGLTSESYAGMIFWDADVWMQPGLVASHPEAAQRITNYRVAKYPQAKANVATAYQSSKNQTNFSPDAAVYSWTSARYGNCTATGPCWDYEYHLNGDIGLSIINQYVASGDTQTFKEKLFPVFDSVATLYSNIVQKNGSSWTLTNMTDPDEYANQVDAGGYTMPLIAQTLLYANSFRQQFGLETNDTWNEIAQDVLVIRENGVTLEFTTMNGSAVVKQADVVLDTYPLGYTHNYGPTDALNDLDYYANRQSPDGPAMTWAIFSVVANQISPSGCSAYTYAQYAFSPYARAPFYQLSEQLIDDASLNGGTHPAYPFLTGHGGALQVNLFGYLGFRYLPDNVIHIDPNLPPQIPHITYRTFYWRGWPITAASTYTHTTLSRAWNVSSLDSADPKFANASIPVHVGLESNVTVYRLPVNGTLTVPNRMVGSKNTLAGNMVQCRPVQSMDGYQPGQFPISVVDGASSTKWQPLYSANVSSVTVTLSSSAVGKSVNGFYFDWAQNPPVNAAVVFHNSSFAQNPATTFSFDNPSASGNLYSVVSVLKDIQLSDPYDPATTDLDVIAIPKGNTTNVTLSSPVPAARYATLFIQGNQANSPAEVAAKNGTGATVAEWAILGQEVQNNGYGDQIEARRLDVRGAAALSGMGSFTQRRKRKMILPRFD

SEQ ID NO: 224 - protein, 1016 aa, Talaromyces variabilis
ALSPGARVNQVLRAHNSLPPSLTDNSTGSSYKTRFDGVTWDQRNWRLQSRVLDQGHYEARGSVANGYIGINVASAGPFFELDTPVDGDVINGWPLFSRRQTFAGLAGFYDLQPTTNSTNYGWLNQYGDESVISGIPHWAGLVLDLGNGDYLDATVDNSTISDYTTTYDYKAGILSWDYKWTPRQNSSSFRISYQLFANKLDINQAVVKLSITPSKSGNASVVNVIDGYSAVRTDFVKSGSDGNAIYTAVSPVGVSNVTAWVYAVLDGDKAFDLSSPSRVTGKPYIHQNESSIAQAVNVEFSAGKTVTIAKFVGAASTDAFSNPQKKAKTAALDGKKKGFEDLLRSHVSEWAQVMPDDSVDDFTLANGTLPDDSFIIEQAVTAVVNPYYLLQNTVGKNALQRVNNAPVNDWSIPVGGLSSDSYAGMIFWDADVWMQPGLVAAFPESAKRITNYRAAKYQQAIANVKTAYSSSQNETVFSPNAAIFPWTSGRYGNCTGTGPCWDYEYHLNGDIAISLVNQWVVSGDTETFQNEHFPIYNSIATVYGDLLKKNGSYYTLTNMTDPDEYANNKDAGGYTMPLIANTLIKANEFRRQFGMAENATWNEMAENVLIIRENDVTLEYTTMNNSVAVKQADVVLRTFPLDYTTNYSSSAALNDLDYYALKQSPDGPGMTYAIFSIVANEVSPSGCSAYTYAQYSYDPYARAPFFQLSEQLIDDYTTNGGTHPAYPFLTGHGGANQVVLYGYLGLRLVADEILHIDPNLPPQIPQVTYRTFYWRGWPIQAASNYTHTTIHRATTVAPLDSAEKKYAKSAISVQVGQQANSTTYKLPADGTPLTVANRKVGSTNTIKGNIAQCQSVQSVDSYQPGQYALAAVDGAASTKWQPEFAANVSSLTVSIPSGKTSVSGFYFDWAQAPPSNATVVFHNNSVSNPTFSSFGSRKGARITHIDVKLSNPYNASSNADAIVIPSGNTTNFTFSNPVPAPRFATLFVQGNQGLDKVDVQNGNGTGATVAEWAILE

SEQ ID NO: 225 - protein, 1050 aa, Aspergillus niger
LPGKNARISASLKRHAGRDVPQTALNSTNVYQTKFSGVTWDEDHWLLTTTTPDQGHYQSRGSVANGYLGINVANIGPFFELDEPVNGDVINGWPLYSRRQSFATISGFWDRQAHTNGSNFPWLSQYGDDSVISGVPHWSGLILDLGDDTYLDATVDNRTISNFKSTYDFKSGVLSWSYTWTPQGNKGSYAITYRLFAHKLYVNRAVVDMEITPLTNGNATVVNVLDGYAAVRTDFVASGQEEGAIFSAVRPWGVNNVTAYVYATLDGSDSVDLSSRRIVTDKPYVSTNSSSVAQAVDVMFTANETVRITKFVGGATTDYFLATQETAKAACLAGLADGYVKSLQSHVGEWATIMHDHSVDRFTDPATGKLPEDSHIVDSAIIAVTNTYYLLQNTAGTNAIVAAGGIPVNVDSCAPGGLTSDSYGGQIFWDADLWMQPGLVASHPESAQRFTNYRIALHYQAQANIETAFTGSKNQTSFSSSAAIYPWTSGRFGNCTATGPCWDYQYHLNGDIGLAMINQWVASGDTAWFKNYLFPIYDAAATLYSELVERNGSSWTLTNMTDPDEYANSINAGGYTMPLIAETLQNANKLRKQFGLEPNETWDEIAEDVLILRENGVTLEYTSMNGSAVVKQADIVLNTFPLTYESDNYTATNSLTDLDYYANKQSADGPAMTYAIFAIVASDVSPSGCSAFTYHQYSYAPYARGPWYQLSEQMIDDASINGGTHPAFPFLTGHGGANQVALYGYLGLRLHPDDTIYIDPNLPPQIPHITYRTFYWHGWPISAWSNYTHTTIQRDSSLAPLASADLLFSNVSIKVQVGQSTASADEATIYYLPLSGALTVPNRMIGSVNTTPGNQVQCHPVYSPDAYEPGQFPISAVDGATSTKWQPSTSDLTSLTVTLSTTAEAGAEEVSGFYFDWSQAPPENLTVIFHDSPIGNPSTVFAAAGSNSTGYRVITSMSNIVQSKPYNAISAEELNVVSIPTANTTTITLDAPVQKARYATLLIAGNQANETAGATVAEWVILGQNSTSSSSAQAKRKMSARSKATLAQLS

SEQ ID NO: 226 - protein, 1056 aa, Trichoderma reesei
TTLVDRVTKCLSRHDGSDAESHFSKNVYKTDFAGVTWDEDNWLLSTTQLKQGAFEARGSVANGYLGINVASVGPFFEVDTEEDGDVISGWPLFSRRQSFATVAGFWDAQPQMNGTNFPWLSQYGSDTAISGIPHWSGLVLDLGGGTYLDATVSNKTISHFRSTYDYKAGVLSWSYKWTPKGNKGSFDISYRLFANKLHVNQAVVDMQVTASKNVQASIVNVLDGFAAVRTDFVESGEDGSAIFAAVRPNGVANVTAYVYADITGSGGVNLSSRKIVHNKPYVHANASSIAQAVPVKFAAGRTVRVTKFVGAASSDAFKNPKQVAKKAAAAGLSNGYTKSLKAHVEEWATVMPESSVDSFADPKTGKLPADSHIVDSAIIAVTNTYYLLQNTVGKNGIKAVDGAPVNVDSISVGGLTSDSYAGQIFWDADLWMQPGLVAAHPEAAERITNYRLARYGQAKENVKTAYAGSQNETFFSASAAVFPWTSGRYGNCTATGPCWDYEYHLNGDIGISLVNQWVVNGDTKDFEKNLFPVYDSVAQLYGNLLRPNKTSWTLTNMTDPDEYANHVDAGGYTMPLIAETLQKANSFRQQFGIEQNKTWNDMASNVLVLRENGVTLEFTAMNGTAVVKQADVIMLTYPLSYGTNYSAQDALNDLDYYANKQSPDGPAMTYAFFSIVANEISPSGCSAYTYAQNAFKPYVRAPFYQISEQLIDDASVNGGTHPAYPFLTGHGGAHQVVLFGYLGLRLVPDDVIHIEPNLPPQIPYLRYRTFYWRGWPISAWSNYTHTTLSRAAGVAALEGADQRFARKPITIHAGPEQDPTAYRLPVKGSVVIPNKQIGSQQTYAGNLVQCHAASSPNDYVPGQFPIAAVDGATSTKWQPASADKVSSITVSLDKEDVGSLVSGFHFDWAQAPPVNATVIFHDEALADPATALASAHKHNSKYTTVTSLTNIELSDPYVSTKDLNAIAIPIGNTTNVTLSHPVAASRYASLLIVGNQGLDPVDVKAKNGTGATVAEWAIFGHGKEHSGKPSSHSKRRLNVRTAATLSNPRSFMRRRL

SEQ ID NO: 227 - protein, 19 aa, Saccharomyces cerevisiae
MLSLKTLLCTLLTVSSVLA

SEQ ID NO: 228 - DNA, 185 bp, Saccharomyces cerevisiae
agtgcttttaactaagaattattagtcttttctgcttattttttcatcatagtttagaacactttatattaacgaatagtttatgaatctatttaggtttaaaaattgatacagttttataagttactttttcaaagactcgtgctgtctattgcataatgcactggaaggggaaaaaaaaggtg

SEQ ID NO: 229 - protein, 555 aa, Pycnoporus sanguineus glucoamylase
QSSAVDAYVASESPIAKQGVLNNIGPNGSKAHGAKAGIVVASPSTENPDYLYTWTRDSSLVFKLLIDQFTSGDDTSLRGLIDDFTSAEAILQQVSNPSGTVSTGGLGEPKFNIDETAFTGAWGRPQRDGPALRATSIIRYANWLLDNGNTTYVSNTLWPVIQLDLDYVADNWNQSTFDLWEEVDSSSFFTTAVQHRALREGATFASRIGQSSVVSGYTTQADNLLCFLQSYWNPSGGYVTANTGGGRSGKDSNTVLTSIHTFDPAAGCDAATFQPCSDKALSNLKVYVDAFRSIYTINNGIASNAAVATGRYPEDSYMGGNPWYLTTSAVAEQLYDALYVWDQLGGLNVTSTSLAFFQQFASGLSTGTYSASSSTYATLTSAIRSFADGFLAINAKYTPADGGLAEQYSRNDGTPLSAVDLTWSYAAALTAFAAREGKTYGSWGAAGLTVPASCSGGGGATVAVTFNVQATTVFGENIYITGSVAALQNWSPDNALILSAANYPTWSITVNLPANTVVQYKYIRKFNGQVTWESDPNNQITTPSGGSFTQNDVWR

SEQ ID NO: 230 - protein, 599 aa, Trichoderma reesei
SVDDFISTETPIALNNLLCNVGPDGCRAFGTSAGAVIASPSTIDPDYYYMWTRDSALVFKNLIDRFTETYDAGLQRRIEQYITAQVTLQGLSNPSGSLADGSGLGEPKFELTLKPFTGNWGRPQRDGPALRAIALIGYSKWLINNNYQSTVSNVIWPIVRNDLNYVAQYWNQTGFDLWEEVNGSSFFTVANQHRALVEGATLAATLGQSGSAYSSVAPQVLCFLQRFWVSSGGYVDSNINTNEGRTGKDVNSVLTSIHTFDPNLGCDAGTFQPCSDKALSNLKVVVDSFRSIYGVNKGIPAGAAVAIGRYAEDVYYNGNPWYLATFAAAEQLYDAIYVWKKTGSITVTATSLAFFQELVPGVTAGTYSSSSSTFTNIINAVSTYADGFLSEAAKYVPADGSLAEQFDRNSGTPLSAVHLTWSYASFLTAAARRAGIVPPSWANSSASTIPSTCSGASVVGSYSRPTATSFPPSQTPKPGVPSGTPYTPLPCATPTSVAVTFHELVSTQFGHTVKVAGNAAALGNWSTSAAVALDAVNYRDNHPLWIGTVNLEAGDVVEYKYIIVGQDGSVTWESDPNHTYTVPAVACVTQVVKEDTWQS

SEQ ID NO: 231 - protein, 633 aa, Bacillus amyloliquefaciens
GPAAANAETANKSNKVTASSVKNGTILHAWNWSFNTLTQNMKDIRDAGYAAIQTSPINQVKEGNQGDKSMRNWYWLYQPTSYQIGNRYLGTEQEFKDMCAAAEKYGVKVIVDAVINHTTSDYGAISDEIKRIPNWTHGNTQIKNWSDRWDVTQNSLLGLYDWNTQNTEVQVYLKRFLERALNDGADGFRYDAAKHIELPDDGNYGSQFWPNITNTSAEFQYGEILQDSASRDTAYANYMNVTASNYGHSIRSALKNRNLSVSNISHYASDVSADKLVTWVESHDTYANDDEESTWMSDDDIRLGWAVIGSRSGSTPLFFSRPEGGGNGVRFPGKSQIGDRGSALFKDQAITAVNTFHNVMAGQPEELSNPNGNNQVFMNQRGSKGVVLANAGSSSVTINTSAKLPDGRYDNRAGAGSFQVANGKLTGTINARSAAVLYPDDIGNAPHVFLENYQTGAVHSFNDQLTVTLRANAKTTKAVYQINNGQQTAFKDGDRLTIGKGDPIGTTYNIKLTGTNGEGAARTQEYTFVKKDPSQTNIIGYQNPDHWGQVNAYIYKHDGGRAIELTGSWPGKAMTKNANGMYTLTLPENTDTANAKVIFNNGSAQVPGQNQPGFDYVQNGLYNNSGLNGYLPH

SEQ ID NO: 232 - DNA, 700 bp, Saccharomyces cerevisiae
cacccatgaaccacacggttagtccaaaaggggcagttcagattccagatgcgggaattagcttgctgccaccctcacctcactaacgctgcggtgtgcggatacttcatgctatttatagacgcgcgtgtcggaatcagcacgcgcaagaaccaaatgggaaaatcggaatgggtccagaactgctttgagtgctggctattggcgtctgatttccgttttgggaatcctttgccgcgcgcccctctcaaaactccgcacaagtcccagaaagcgggaaagaaataaaacgccaccaaaaaaaaaaaaataaaagccaatcctcgaagcgtgggtggtaggccctggattatcccgtacaagtatttctcaggagtaaaaaaaccgtttgttttggaatttcccatttcgcggccacctacgccgctatctttgcaacaactatctgcgataactcagcaaattttgcatattcgtgttgcagtattgcgataatgggagtcttacttccaacataacggcagaaagaaatgtgagaaaattttgcatcctttgcctccgttcaagtatataaagtcggcatgcttgataatctttctttccatcctacattgttctaattattcttattctcctttattctttcctaacataccaagaaattaatcttctgtcattcgcttaaacactatatcaataa

SEQ ID NO: 233 - DNA, 240 bp, Saccharomyces cerevisiae
tcagtactgacaataaaaagattcttgttttcaagaacttgtcatttgtatagtttttttatattgtagttgttctattttaatcaaatgttagcgtgatttatattttttttcgcctcgacatcatctgcccagatgcgaagttaagtgcgcagaaagtaatatcatgcgtcaatcgtatgtgaatgctggtcgctatactgctgtcgattcgatactaacgccgccatccagtgtcga

SEQ ID NO: 234 - protein, 18 aa, Saccharomyces cerevisiae
MQLLRCFSIFSVIASVLA

SEQ ID NO: 235 - protein, 274 aa, Thermomyces lanuginosus
EVSQDLFNQFNLFAQYSAAAYCGKNNDAPAGTNITCTGNACPEVEKADATFLYSFEDSGVGDVTGFLALDNTNKLIVLSFRGSRSIENWIANLNFWLKKINDICSGCRGHDGFTSSWRSVADTLRQKVEDAVREHPDYRVVFTGHSLGGALATVAGADLRGNGYDIDVFSYGAPRVGNRAFAEFLTVQTGGTLYRITHTNDIVPRLPPREFGYSHSSPEYWIKSGTLVPVTRNDIVKIEGIDATGGNNQPNIPDIPAHLWYFQATDACNAGGFS

SEQ ID NO: 236 - protein, 277 aa, Thermomyces lanuginosus
APAPVLRRDVSSSVLSELDLFAQYSAAAYCSSNIGSPGTKLTCSVGNCPRVEAADTETLIEFNESSSFGDVTGYIAVDRTNSLLVLAFRGSSTVSNWEADLDFPLTDASSLCSGCEIHSGFWAAWQTVQASITSTLESAIASYPGYTLVFTGHSYGAALAAIAATTLRNAGYTIQLYDYGQPRLGNLALAQYITAQTQGANYRVTHTDDIVPKLPPELFGYHHFSPEYWITSGDNVTVTTSDVQVVTGIDSTAGNDGTLLDSTSAHDWYIVYIDGCD

SEQ ID NO: 237 - protein, 594 aa, Penicillium emersonii
SAPYDKRDLAQEIWDDIKNAVDCAGCQVVLTALKGVADLGTTALVDVLTEVCNISGKEDSDVCSGIISREGPVLDYVLQHLDIGSHTSQVICASAFGLCQYPEVRPYNLTFPKPKPNTTRPEPSGESPIQVVHFSDTHVDLSYETGSNYNCTKPICCRPYTAEDAPGNTTTPCGPYGNTKCDAPLSLEESMFAAIKALNPQPAFSIYTGDVVAHDIWLVDQNEVIEDLNATYDRMAGLGLVYAAIGNHDTAPVNDLPTSNIPSEYSANWTYEALSYDFTMLTQSASAQTAANYGSYSAIYPGSYGTDLRVISYNSIFYYVDNFWAYQDPMEFDPDGQLAWLINELQEAETAGQRVWIIAHVPTGTSDHFHDYSHYFDQIVQRYEATIAALFYGHTHIDQFQISYSNYSNRAFDTATAIGYIMPSLTPTSGPPTFRVYDVDPKTFAVLDFTNYIANISDPAFQSGPSWQKYYSAKETYGSLLSPPVTDPTAELTPAFWHNVTVAFEQDNATFQEYWARQTRGYDVSSCTGSCITQAICGLRAGDAQYNCVTPTPGFNFAKRDTSNPKQALSHVEKCEGSGLLGLLRRMVADSKSS

SEQ ID NO: 238 - protein, 259 aa, Bacillus thuringiensis
HENDGGSKIKIIHRWSAEDKHKEGVNSHLWIVNRAIDIMSRNTTLVKQDRVAQLNEWRTELENGIYAADYENPYYDNSTFASHFYDPDNGKTYIPFAKQAKETGAKYFKLAGESYKNKDMKQAFFYLGLSLHYLGDVNQPMHAANFTNLSYPQGFHSKYENFVDTIKDNYKVTDGNGYWNWKGTNPEDWIHGAAVVAKQDYSGIVNDNTKDWFVKAAVSQEYADKWRAEVTPMTGKRLMDAQRVTAGYIQLWFDTYGDR

SEQ ID NO: 239 - protein, 297 aa, Pseudomonas sp.
QESPAFIDPASWNTPFNGIAQVACHNCYEKQYANTFSSVLDSVRTLELDFWDQRDAVSGGSPHHWFVRHNPGTLFQSGNDNNCTGDGTGKNDLEACLNDVKNWSDKHPGHFPITLILDKKQGWSKESSGRTPKDFDELVARVFQGKLFTPQDLATHIGSGAGALQGNLKGKSWPTANDLQGKVLLVLNHSENQKLSQYAEARTSKAKVFISPVTNGQNDISGKVSGMSSQSSGYVAMNNMGKGDKSWAKQAFAYSHIGRVWGDDEVSFAQHINQKINLSAYYRFAAQSAGGYRIRPF

SEQ ID NO: 240 - protein, 625 aa, Kionochaeta sp.
AVNPADVLSVVEKRVDPASGLEVRSIWDTIWNDIKSAADCTACEAVLTLLKGVAAFGDNFFVEVLTEICDLSGAEDDDVCSGVLSLEGPIIANDIRKMSIGSKTSELFCITFLGLCSYPAVDAFTVPFPTAKSAATRPVSSGKDPIYVVHYSDIHIDPFYVAGSASNCTKPICCRDYTSASSPGNNNSPAGPYGDHNCDVPISLEDSMYAAIKKLVPDAAFGIFTGDIVDHAVWNTSESQNIIDMNDAYTRMKNSGMLPTIFATAGNHEASPVNSFPPPAIGNESQWVYDTLASDWSQWIGTSGASSVESIGAYSVQYGSTKLRVISLNTNMYYIENFYLYEPTMEQDPAGQFAWLVSELSAAEAAGERVWIIGHMPLGLSDAFHDPSNYFDQIVNRYEATIAAMFFGHTHEDHFQISYSDYNARTAANARAVSYIMPSLTPTSGHPTFRVYTVDPETFGVLDATTYYADMSQPTYQTAGPAWSVYYSAKAAYGGLVDPPVAADDAAAELTPAFWHNVTAALAADPASFDAYYARKTRGWDVAACAGACAAAEVCALRAARAQDNCVVPTPGVHFSKRADEGTLAHHRDECGVSVARNSLSSLVVQREALEHLEGRLSEKRRMAV

SEQ ID NO: 241 - protein, 613 aa, Mariannaea pinicola
QEVTHDLAGIKRSLESRDWVEDLWDKFESDATCAGCESLVLVLKGLAAISDQAFIDVLQEICKISGAEDDDVCDGSIQLEGPVIASGLRSMAIGSRTSKEFCTTFLGLCAYPAVQQWSVPFSSSKSSKTRPSSSGKDPIKVVHYSDIHIDPLYVGGSNSNCTKPICCRSYTKADQPGNNKYPAGPNGDHNCDSPVSLEKSMYNAIKEIVPDAAFTIFTGDIVDHAVWNTSQSYNTEQITNAYGLMSDNLGTIYGTAGNHEAHPANAFQPNSVGNVSQWVYDLLSGLWSQWISTEAKADSEKLGAYSTKYPGGNLRIISLNTNMYYRENYWLYRKTMIQDPSNQISWLVNELEAAETAGERVYIIGHMPLGDSNSFHDQSNYLDQVINRYSATISAMFFGHTHDDQFQISYSNWSNRNFSNALVTSYIGPSLTPTAGMPAFRVYDVDPVTFGILDSTTYIADMTDSAFQTTGPVWKKYYSAKEVYGSLLSPAVTDSSAELTAAFWHNVTTLFEADNTAFEAFLSRKSRGWKSESCTGTCKANEICQLRAARSENNCYTPSLGISFNKRSLNPVEERDECGISVTRATVSAMGVRKDVLRLLKKRFIEKAGEVRG

SEQ ID NO: 242 - protein, 259 aa, Fictibacillus macauensis
HENEGGNKVRVIQYWSAEDPHHEDTNTHLWIVRHAMEIMANNKDVVKPGEVEQLKQWQSDLEQGIYDADHANPYYDNATFASHFYDPDTGKSYIPLAAHAKTTSVKYFKRAGEAYQKGDHKQAFYNLGLALHYIGDLNQPMHAANFTNLSYPQGFHSKYENYVDSFKEDYAVKDGEGYWHWKGTNPEDWLHGTAVAAKKDYPDIVNDTTKAWFVKAAVSNSYAAKWRAAVVPATGKRLTEAQRILAGYMQLWFDTYVNK

SEQ ID NO: 243 - DNA, 250 bp, Saccharomyces cerevisiae
acagaagacgggagacactagcacacaactttaccaggcaaggtatttgacgctagcatgtgtccaattcagtgtcatttatgattttttgtagtaggatataaatatatacagcgctccaaatagtgcggttgccccaaaaacaccacggaacctcatctgttctcgtactttgttgtgacaaagtagctcactgccttattatcacattttcattatgcaacgcttcggaaaatacgatgttgaaaat

SEQ ID NO: 244 - protein, 561 aa, Punctularia strigosozonata
SSKSVSAYISSESPIAHSKLLDNIGPDGAKAPGAFPGVVVASPSTDNPNYYYSWIRDSSLVFKTLIDDYVNGKNTSKSLRSLIDDFVTASSVFQQTPNPSGNVSTGGLGEPKFYVNETAFLDSWGRPQRDGPALRSTALITYANYLLDNDNTTWVKDTLWPIIELDVNYVSDFWNYTTFDLWEEVASSSFFTTAVQHRALRQASKLAKTLDKTDNIDSWNTQADNVLCFLQSYWNGSAIIANTGGGRSGIDANTVLASIHTFDSSAGCDATTFQPCSDKALSNLKVYVDAFRSIYEINSGIDPNAAVATGRYPEDVFYDGNPWYLATAAVAEQLYDALYVWNTTGSLEITDISLPFFQQFDSDVKTGTYSDDDTFDSLISSIQSFADGFLEIHAKYTPDDGALSEEFSKTDGSQTSAADLTWSYAAALTAFDARSRDAAVKWGAKGLQVPDGTCKTNEGGDDGLGVPVTFLVKDAETVEGQSVYITGSIATLKSWSPDDALLMSPSDYPTWTLTVNLSASESVQYKYIKKDTAGTVIWESDPNNSLLVPSGGSVTTDDTWR

SEQ ID NO: 245 - protein, 551 aa, Fibroporia radiculosa
QSTSVSAYIASESPVAKAGVLANIGTEGSLSSGAYSGVVIASPSTVNPDYLYTWVRDSSLTFQALIDQYVYGEDPTLRSLIDEFITAESILQQTTNPSGTVSTGGLGEPKFNINETAFTGPWGRPQRDGPALRSTAIITYATYLWNSGNTSYVSDSLWPIIELDLNYIATYWNFSTFDLWEEIDSSSFWTTAVQHRALRQGITFANLIGQTSPVSNYETQAGDILCFLQTYWNPTGNYMTANTGGGRSGKDSNTVLASVHTFDPDAGCDSTTFQPCSDKALSNLKVYVDSFRSLYAINDGIASDAAVATGRYPEDVYYGGNPWYLCTFAVAEQLYDALIVWSSQGYLEITDLSLAFFQQFDSDVGTGTYDSGSSTYSTLTSAIRTFADGFVLTNAKYTPTNGSLSEEYTSADGTPISAYDLTWSYASALTVFAAEAGTTYGSWGAAGLTVPSTCTSGVAVTFEVDYDTEYGENVYITGSVNALENWSATNALIMSAADYPTWSITVYLPPSTTIQYKYLTQYNGEVTWEDDPNNEITTPASGSMTQVDSWH

SEQ ID NO: 246 - protein, 552 aa, Wolfiporia cocos
QTTSVTSYIASESPIAKAGVLANIGADGSLSSGAYSGIVIASPSTVNPNYLYTWTRDSSLTFMELINQYIYGEDDTLRTLIDEFVSAEATLQQVTNPSGTVSTGGLGEPKFNINETAFTGPWGRPQRDGPALRATAIMAYATYLYENGNTSYVTDTLWPIIELDLGYVAEYWNESTFDLWEEIDSSSFFTTAVQHRALRAGVTFANLIGETSDVSNYQENADDLLCFLQSYWNPTGSYVTANTGGGRSGKDANTLLASIHTFDPDAGCNATTFQPCSDKALSNHKVYVDSFRSLYAINDDISSDAAVATGRYPEDVYYNGNPWYLCTLAAAEQLYDSLIVWKAQGYIEVTSLSLAFFQQFDASVSAGTYDSSSDTYTTLLDAVQTYADGFVLMVAQYTPANGSLSEQYAKADGSPTSAYDLTWSFAAALTAFAARDGKTYGSWGAADLSSTCSGSTDTVAVTFEVQYDTQYGENLYITGSVSQLEDWSADDALIMSSADYPTWSITVDLPPSTLIQYKYLTKYNGDVTWEDDPNNEITTPASGSYTQVDSWH

SEQ ID NO: 247 - protein, 591 aa, Talaromyces emersonii
ATGSLDSFLATETPIALQGVLNNIGPNGADVAGASAGIVVASPSRSDPNYFYSWTRDAALTAKYLVDAFNRGNKDLEQTIQQYISAQAKVQTISNPSGDLSTGGLGEPKFNVNETAFTGPWGRPQRDGPALRATALIAYANYLIDNGEASTADEIIWPIVQNDLSYITQYWNSSTFDLWEEVEGSSFFTTAVQHRALVEGNALATRLNHTCSNCVSQAPQVLCFLQSYWTGSYVLANFGGSGRSGKDVNSILGSIHTFDPAGGCDDSTFQPCSARALANHKVVTDSFRSIYAINSGIAEGSAVAVGRYPEDVYQGGNPWYLATAAAAEQLYDAIYQWKKIGSISITDVSLPFFQDIYPSAAVGTYNSGSTTFNDIISAVQTYGDGYLSIVEKYTPSDGSLTEQFSRTDGTPLSASALTWSYASLLTASARRQSVVPASWGESSASSVLAVCSATSATGPYSTATNTVWPSSGSGSSTTTSSAPCTTPTSVAVTFDEIVSTSYGETIYLAGSIPELGNWSTASAIPLRADAYTNSNPLWYVTVNLPPGTSFEYKFFKNQTDGTIVWEDDPNRSYTVPAYCGQTTAILDDSWQ

SEQ ID NO: 248 - protein, 578 aa, Rhizopus microsporus
VPTSAAVQVESYNYDGTTFSGRIFVKNIAYSKVVTVIYSDGSDNWNNNNNKVSAAYSEAISGSNYEYWTFSAKLSGIKQFYVKYEVSGSTYYDNNGTKNYQVQATSATSTTATATTTTATGTTTTSTGPTSTASVSFPTGNSTISSWIKNQEEISRFAMLRNINPPGSATGFIAASLSTAGPDYYYSWTRDSALTANVIAYEYNTTFTGNTTLLKYLKDYVTFSVKSQSVSTVCNCLGEPKFNADGSSFTGPWGRPQNDGPAERAVTFMLIADSYLTQTKDASYVTGTLKPAIFKDLDYVVSVWSNGCYDLWEEVNGVHFYTLMVMRKGLILGADFAARNGDSSRASTYKQTASTMESKISSFWSDSNNYVQVSQSVTAGVSKKGLDVSTLLAANIGSLPDGFFTPGSEKILATAVALENAFASLYPINSNLPSYLGNSIGRYPEDTYNGNGNSQGNPWFLAVNAYAELYYRAIKEWISNGKVTVSNISLPFFKKFDSSATSGKTYTAGTSDFNNLAQNIALGADRFLSTVKFHAYTNGSLSEEYDRSTGMSTGARDLTWSHASLITVAYAKAGSPAA

SEQ ID NO: 249 - protein, 579 aa, Rhizopus delemar
ASIPSSASVQLDSYNYDGSTFSGKIYVKNIAYSKKVTVIYADGSDNWNNNGNTIAASYSAPISGSNYEYWTFSASINGIKEFYIKYEVSGKTYYDNNNSANYQVSTSKPTTTTATATTTTAPSTSTTTPPSSSEPATFPTGNSTISSWIKKQEGISRFAMLRNINPPGSATGFIAASLSTAGPDYYYAWTRDAALTSNVIVYEYNTTLSGNKTILNVLKDYVTFSVKTQSTSTVCNCLGEPKFNPDGSGYTGAWGRPQNDGPAERATTFILFADSYLTQTKDASYVTGTLKPAIFKDLDYVVNVWSNGCFDLWEEVNGVHFYTLMVMRKGLLLGADFAKRNGDSTRASTYSSTASTIANKISSFWVSSNNWIQVSQSVTGGVSKKGLDVSTLLAANLGSVDDGFFTPGSEKILATAVAVEDSFASLYPINKNLPSYLGNSIGRYPEDTYNGNGNSQGNPWFLAVTGYAELYYRAIKEWIGNGGVTVSSISLPFFKKFDSSATSGKKYTVGTSDFNNLAQNIALAADRFLSTVQLHAHNNGSLAEEFDRTTGLSTGARDLTWSHASLITASYAKAGAPAA

SEQ ID NO: 250 - protein, 579 aa, Rhizopus oryzae
ASIPSSASVQLDSYNYDGSTFSGKIYVKNIAYSKKVTVVYADGSDNWNNNGNTIAASFSGPISGSNYEYWTFSASVKGIKEFYIKYEVSGKTYYDNNNSANYQVSTSKPTTTTAATTTTTAPSTSTTTRPSSSEPATFPTGNSTISSWIKKQEDISRFAMLRNINPPGSATGFIAASLSTAGPDYYYAWTRDAALTSNVIVYEYNTTLSGNKTILNVLKDYVTFSVKTQSTSTVCNCLGEPKFNPDGSGYTGAWGRPQNDGPAERATTFVLFADSYLTQTKDASYVTGTLKPAIFKDLDYVVNVWSNGCFDLWEEVNGVHFYTLMVMRKGLLLGADFAKRNGDSTRASTYSSTASTIANKISSFWVSSNNWVQVSQSVTGGVSKKGLDVSTLLAANLGSVDDGFFTPGSEKILATAVAVEDSFASLYPINKNLPSYLGNAIGRYPEDTYNGNGNSQGNPWFLAVTGYAELYYRAIKEWISNGGVTVSSISLPFFKKFDSSATSGKKYTVGTSDFNNLAQNIALAADRFLSTVQLHAPNNGSLAEEFDRTTGFSTGARDLTWSHASLITASYAKAGAPAA

SEQ ID NO: 251 - protein, 435 aa, Thermococcus gammatolerans
KYSELEQGGVIMQAFYWDVPAGGIWWDTIRQKIPEWYDAGISAIWIPPASKGMGGAYSMGYDPYDYFDLGEFYQKGTVETRFGSKEELVNMISTAHRYGIKVIADIVINHRAGGDLEWNPYVGDYTWTDFSQVASGKYKAHYMDFHPNNYSTSDEGTFGGFPDIDHLVPFNKYWLWASDESYAAYLRSIGVDAWRFDYVKGYGAWVVKDWLSWWGGWAVGEYWDTDVNALLNWAYDSGAKVFDFPLYYKMDEAFDNKNIPALVYAIQNGGTVVSRDPFKAVTFVANHDTNIIWNKYPAYAFILTYEGQPVIFYRDYEEWLNKDKLNNLIWIHEHLAGGSTKILYYDDDELIFMREGYGDRPGLITYINLGSGWAERWVNVGSKFAGYTIHEYTGNLGGWVDRYVYYNGWVKLTAPPHDPANGYYGYSVWSYAGVG

SEQ ID NO: 252 - protein, 432 aa, Thermococcus thioreducens
ETLENGGVIMQAFYWDVPMGGIWWDTIAQKIPDWASAGISAIWIPPASKGMSGGYSMGYDPYDYFDLGEYYQKGTVETRFGSKQELVNMINTAHAYGMKVIADIVINHRAGGDLEWNPFVNDYTWTDFSKVASGKYTANYLDFHPNELHAGDSGTFGGYPDICHDKSWDQYWLWASNESYAAYLRSIGIDAWRFDYVKGYAPWVVKDWLNWWGGWAVGEYWDTNVDALLNWAYASGAKVFDFPLYYKMDEAFDNNNIPALVDALRYGQTVVSRDPFKAVTFVANHDTDIIWNKYPAYAFILTYEGQPMIFYRDYEEWLNKDRLKNLIWIHDHLAGGSTDIVYYDSDELIFVRNGYGSKPGLITYINLGSSKAGRWVYVPKFAGSCIHEYTGNLGGWVDKWVDSSGWVYLEAPAHDPANGQYGYSVWSYCGVG

SEQ ID NO: 253 - protein, 440 aa, Thermococcus eurythermalis
QPAGAAKYLELEEGGVIMQAFYWDVPSGGIWWDTIRQKIPEWYDAGISAIWIPPASKGMGGAYSMGYDPYDFFDLGEYDQKGTVETRFGSKQELVNMINTAHAYGIKVIADIVINHRAGGDLEWNPFVNDYTWTDFSKVASGKYTANYLDFHPNEVKCCDEGTFGGFPDIAHEKSWDQYWLWASNESYAAYLRSIGVDAWRFDYVKGYGAWVVKDWLDWWGGWAVGEYWDTNVDALLNWAYSSDAKVFDFPLYYKMDAAFDNKNIPALVEALKNGGTVVSRDPFKAVTFVANHDTDIIWNKYPAYAFILTYEGQPTIFYRDYEEWLNKDRLKNLIWIHDHLAGGSTDIVYYDNDELIFVRNGYGDKPGLITYINLGSSKAGRWVYVPKFAGACIHEYTGNLGGWVDKWVDSSGWVYLEAPAHDPANGYYGYSVWSYCGVG

SEQ ID NO: 254 - protein, 432 aa, Thermococcus hydrothermalis
ETLENGGVIMQAFYWDVPGGGIWWDTIAQKIPDWASAGISAIWIPPASKGMSGGYSMGYDPYDFFDLGEYYQKGSVETRFGSKEELVNMINTAHAHNMKVIADIVINHRAGGDLEWNPFTNSYTWTDFSKVASGKYTANYLDFHPNELHAGDSGTFGGYPDICHDKSWDQHWLWASNESYAAYLRSIGIDAWRFDYVKGYAPWVVKNWLNRWGGWAVGEYWDTNVDALLSWAYDSGAKVFDFPLYYKMDEAFDNNNIPALVDALKNGGTVVSRDPFKAVTFVANHDTNIIWNKYPAYAFILTYEGQPAIFYRDYEEWLNKDRLRNLIWIHDHLAGGSTDIIYYDSDELIFVRNGYGDKPGLITYINLGSSKAGRWVYVPKFAGSCIHEYTGNLGGWIDKWVDSSGRVYLEAPAHDPANGQYGYSVWSYCGVG

SEQ ID NO: 255 - protein, 434 aa, Pyrococcus furiosus
KYLELEEGGVIMQAFYWDVPGGGIWWDHIRSKIPEWYEAGISAIWLPPPSKGMSGGYSMGYDPYDYFDLGEYYQKGTVETRFGSKEELVRLIQTAHAYGIKVIADVVINHRAGGDLEWNPFVGDYTWTDFSKVASGKYTANYLDFHPNELHCCDEGTFGGFPDICHHKEWDQYWLWKSNESYAAYLRSIGFDGWRFDYVKGYGAWVVRDWLNWWGGWAVGEYWDTNVDALLSWAYESGAKVFDFPLYYKMDEAFDNNNIPALVYALQNGQTVVSRDPFKAVTFVANHDTDIIWNKYPAYAFILTYEGQPVIFYRDFEEWLNKDKLINLIWIHDHLAGGSTTIVYYDNDELIFVRNGDSRRPGLITYINLSPNWVGRWVYVPKFAGACIHEYTGNLGGWVDKRVDSSGWVYLEAPPHDPANGYYGYSVWSYCGVG

SEQ ID NO: 256 - protein, 626 aa, Bacillus amyloliquefaciens
ETANKSNKVTASSVKNGTILHAWNWSFNTLTQNMKDIRDAGYAAIQTSPINQVKEGNQGDKSMRNWYWLYQPTSYQIGNRYLGTEQEFKDMCAAAEKYGVKVIVDAVINHTTSDYGAISDEIKRIPNWTHGNTQIKNWSDRWDVTQNSLLGLYDWNTQNTEVQAYLKRFLERALNDGADGFRYDAAKHIELPDDGNYGSQFWPNITNTSAEFQYGEILQDSASRDTAYANYMNVTASNYGHSIRSALKNRNLSVSNISHYASDVSADKLVTWVESHDTYANDDEESTWMSDDDIRLGWAVIGSRSGSTPLFFSRPEGGGNGVRFPGKSQIGDRGSALFKDQAITAVNTFHNVMAGQPEELSNPNGNNQIFMNQRGSKGVVLANAGSSSVTINTSAKLPDGRYDNRAGAGSFQVANGKLTGTINARSAAVLYPDDIGNAPHVFLENYQTGAVHSFNDQLTVTLRANAKTTKAVYQINNGQQTAFKDGDRLTIGKGDPIGTTYNIKLTGTNGEGAARTQEYKFVKKDPSQTNIIGYQNPDHWGQVNAYIYKHDGGRAIELTGSWPGKAMTKNADGMYTLTLPENADTANAKVIFNNGSAQVPGQNQPGFDYVQNGLYNNSGLNGYLPH

SEQ ID NO: 257 - protein, 250 aa, Saccharomyces cerevisiae
MPLTTKPLSLKINAALFDVDGTIIISQPAIAAFWRDFGKDKPYFDAEHVIHISHGWRTYDAIAKFAPDFADEEYVNKLEGEIPEKYGEHSIEVPGAVKLCNALNALPKEKWAVATSGTRDMAKKWFDILKIKRPEYFITANDVKQGKPHPEPYLKGRNGLGFPINEQDPSKSKVVVFEDAPAGIAAGKAAGCKIVGIATTFDLDFLKEKGCDIIVKNHESIRVGEYNAETDEVELIFDDYLYAKDDLLKW

SEQ ID NO: 258 - protein, 250 aa, Saccharomyces cerevisiae
MGLTTKPLSLKVNAALFDVDGTIIISQPAIAAFWRDFGKDKPYFDAEHVIQVSHGWRTFDAIAKFAPDFANEEYVNKLEAEIPVKYGEKSIEVPGAVKLCNALNALPKEKWAVATSGTRDMAQKWFEHLGIRRPKYFITANDVKQGKPHPEPYLKGRNGLGYPINEQDPSKSKVVVFEDAPAGIAAGKAAGCKIIGIATTFDLDFLKEKGCDIIVKNHESIRVGGYNAETDEVEFIFDDYLYAKDDLLKW

SEQ ID NO: 259 - protein, 391 aa, Saccharomyces cerevisiae
MSAAADRLNLTSGHLNAGRKRSSSSVSLKAAEKPFKVTVIGSGNWGTTIAKVVAENCKGYPEVFAPIVQMWVFEEEINGEKLTEIINTRHQNVKYLPGITLPDNLVANPDLIDSVKDVDIIVFNIPHQFLPRICSQLKGHVDSHVRAISCLKGFEVGAKGVQLLSSYITEELGIQCGALSGANIATEVAQEHWSETTVAYHIPKDFRGEGKDVDHKVLKALFHRPYFHVSVIEDVAGISICGALKNVVALGCGFVEGLGWGNNASAAIQRVGLGEIIRFGQMFFPESREETYYQESAGVADLITTCAGGRNVKVARLMATSGKDAWECEKELLNGQSAQGLITCKEVHEWLETCGSVEDFPLFEAVYQIVYNNYPMKNLPDMIEELDLHED

SEQ ID NO: 260 - protein, 440 aa, Saccharomyces cerevisiae
MLAVRRLTRYTFLKRTHPVLYTRRAYKILPSRSTFLRRSLLQTQLHSKMTAHTNIKQHKHCHEDHPIRRSDSAVSIVHLKRAPFKVTVIGSGNWGTTIAKVIAENTELHSHIFEPEVRMWVFDEKIGDENLTDIINTRHQNVKYLPNIDLPHNLVADPDLLHSIKGADILVFNIPHQFLPNIVKQLQGHVAPHVRAISCLKGFELGSKGVQLLSSYVTDELGIQCGALSGANLAPEVAKEHWSETTVAYQLPKDYQGDGKDVDHKILKLLFHRPYFHVNVIDDVAGISIAGALKNVVALACGFVEGMGWGNNASAAIQRLGLGEIIKFGRMFFPESKVETYYQESAGVADLITTCSGGRNVKVATYMAKTGKSALEAEKELLNGQSAQGIITCREVHEWLQTCELTQEFPLFEAVYQIVYNNVRMEDLPEMIEELDIDDE

SEQ ID NO: 261 - DNA, 700 bp, Saccharomyces cerevisiae
cacatagactgcgtcataaaaatacactacggaaaaaccataaagagcaaagcgatacctacttggaaggaaaaggagcacgcttgtaagggggatgggggctaagaagtcattcactttcttttcccttcgcggtccggacccgggacccctcctctccccgcacgatttcttcctttcatatcttccttttattcctatcccgttgaagcaaccgcactatgactaaatggtgctggacatctccatggctgtgacttgtgtgtatctcacagtggtaacggcaccgtggctcggaaacggttccttcgtgacaattctagaacaggggctacagtctcgataatagaataataagcgcatttttgctagcgccgccgcggcgcccgtttcccaatagggaggcgcagtttatcggcggagctctacttcttcctatttgggtaagcccctttctgttttcggccagtggttgctgcaggctgcgccggagaacatagtgataagggatgtaactttcgatgagagaattagcaagcggaaaaaaactatggctagctgggagttgtttttcaatcatataaaagggagaaattgttgctcactatgtgacagtttctgggacgtcttaacttttattgcagaggactatcaaatcatacagatattgtcaaaaaaaaaaaaagactaataataaaaa

SEQ ID NO: 262 - protein, 496 aa, Triticum aestivum
MAGTGVFADVLDGEVYKYYADGEWRASASGKTVAIVNPTTRQTQYRVQACTQEEVNKVMDAAKVAQKSWARTPLWKRAELLHKAAAILKEHKTPIAESLVKEIAKPAKDAVSEVVRSGDLVSYTAEEGVRILGEGKLLVSDSFPGNERNKYCLSSKVPLGVVLAIPPFNYPVNLAVSKIGPALIAGNSLVLKPPTQGAVAALHMVHCFHLAGFPKGLISCVTGKGSEIGDFLTMHPGVNCISFTGGDTGIAISKKAGMVPLQMELGGKDACIVLEDADLDLVAANIVKGGFSYSGQRCTAVKVVLIMEAVADTVVEKVNAKLAKLKVGPPEDDSDITPVVTESSANFIEGLVMDAKEKGATFCQEYRREGNLIWPLLLDHVRPDMRIAWEEPFGPVLPVIRINSVEEGIHHCNASNFGLQGCVFTRDINKAIMISDAMESGTVQINSAPARGPDHFPFQGLKDSGIGSQGITNSINMMTKVKSTVINLPSPSYTMG

SEQ ID NO: 263 - protein, 498 aa, Chlamydomonas reinhardtii
MSAQEFYAPILASTGVYKFYIDGQWKESVSGKSVAISNPSTRQTAYQVQACTQDEVNKMFESAKVAQKAWARTPLYKRAEVLHKVASLMRQYAQPIADCLVKEVAKPSKDSLTEVVRSADLIDYTAEEGVRYLGEGQLLNSDSFPGNARNKLCLVSKVPLGVVLAIPPFNYPVNLAVSKLAPALMAGNAVVLKPPTQGAVAGIHMVQCFHAAGLPAGLLSVATGRGAEIGDFLTTHPDVNCISFTGGDTGISIAKKAGMVPLQMELGGKDVCIVCEDADLDLAAKHIIKGGFSYSGQRCTAVKLVLVAAPVADRLVAAVAAGVAKLSVGRPEDDCDITPVVSESSANFIEGLAMDAKAKGATFVTGEWRREGNLIWPVLLDHVTADMRLAWEEPFGPVLPVMRVSSVEAAVEHCNKSKYGLQGCVFTRDINAAIRISDAMETGTVQVNSAPARGPDHFPFQGFRDSGIGSQGIRNSLAMMIKTKSTVINLDKESYTLG

SEQ ID NO: 264 - protein, 496 aa, Apium graveolens
MAGSGVYADIIEGDVFKYYSDGEWKKSSSGKSVAIINPTTRMTQFKVQACTQEEVNKAMETAKKVQKQWAKTPLWKRAELLHKAAAILKEHKAAIADCLVKEIAKPAKDSVTEVVRSGDLVSYCAEEGVRLLGEGKFLVSDSFPGNERTKYCLTSKIPLGVILAIPPFNYPVNLAVSKIGPALIAGNALVLKPPTQGAVACLHMVHCFHLAGFPKGLISCITGKGSEIGDFLTMHPGVNCISFTGGDTGIAISKKAGMVPLQMELGGKDACIVLEDADLDLVASNVIKGGFSYSGQRCTAIKVILVMQSVADTLVEKVNAKVAKLTVGPPEDNSDITPVVSESSANFIEGLVKDAKEKGATFCQEYKREGNLIWPLLLDNVKPDMRIAWEEPFGPILPVIRINSAEEGIHHCNASNFGLQGCVFTRDINKAMLISDAMESGTIQINSAPARGPDHFPFQGLKDSGIGSQGITNSINMMTKIKTTVINLPSPSYTMG

SEQ ID NO: 265 - protein, 496 aa, Cicer arietinum
MAATGVLAEILDGDVFKYYADGEWQKSSSGKSVSIINPTTRKPQYKVQACSQEEVNKVMDSAKAAQKLWAKTPLWKRAELLHKAAAILKEHKAEIAECLVKEVAKPAKDAVTEVVRSGDLVSYCAEEGVRILGEGKFLVSDSFPGNERTKYCLTSKIPLGVILAIPPFNYPVNLAVSKIAPALIAGNAIVLKPPTQGAVAALHMVHCFHLAGFPKGLISCVTGKGSEIGDFLTMHPAVNCISFTGGDTGIAVSKKAGMIPLQMELGGKDACIVLEDADLDLVAANIIKGGFSYSGQRCTAVKVVLVMESVADALVEKVNAKVAKLSVGPPENDCDITPVVSESSANFIEGLVLDAKQKGATFCQEYKREGNLIWPLLLDNVKPDMRIAWEEPFGPVLPVIRINSVEEGIHHCNASNFGLQGCVFTKDVNKAILISDAMETGTVQINSAPARGPDHFPFQGIKDSGIGSQGITNSINMMTKTKTTVINLPSPSYTMG

SEQ ID NO: 266 - protein, 479 aa, Bacillus pseudomycoides
MTTSNTYKFYLDGEWRESSSGQTIDIPSPYLHEVIGKVQAITREEVDEAIKSAQQAQKEWAEASLQDRAKYLYKWADELVNMQDEIADIVMKEVGKGYKDAKKEVVRTADLIRYTVDEALHMHGESMMGDSFPGGSKSKLAIIQRAPRGVVLAIAPFNYPVNLSAAKLAPALIMGNAVIFKPATQGVISGIKMVEALHKAGLPKGLVNVATGRGSVIGDYLVEHPGVNMVSFTGGTHTGAHLAKKAAMIPLVLELGGKDPGIVREDADLGEAAKHIVSGAFSYSGQRCTAIKRVLVHENVADELVSLLKDQVAELTVGSPEQDSTIVPLIDDKSADFVQGLVDDAVEKGATIVIGNKRERNLIYPTLIDNVTEDMKVAWEEPFGPILPIIRVSSDEQAIEIANKSDFGLQASVFTKDINKAFAIANKIDTGSVQINGRTERGPDHFPFIGVKGSGMGAQGIRKSLESMTREKVTVLNLV

SEQ ID NO: 267 - protein, 476 aa, Streptococcus equinus
MTKQYKNYVNGEWKLSKEEIKIYAPATGEELGSVPAMSQEEVDYVYASAKAAQKAWRALSYVERAEYLHKAADILMRDAEKIGAVLSKEIAKGYKSAVGEVIRTAEIINYAAEEGVRLEGEVLEGGSFDPASKKKIAIVRREPVGLVLAISPFNYPINLAGSKIAPALISGNVVALKPPTQGSISGLLLAEAFAEAGLPAGVFNTITGRGSVIGDYIVEHEAVNYINFTGSTPVGEHIGHLAGMRPIMLELGGKDSAIILEDADLDLAAKNIVAGAYGYSGQRCTAVKRVLVMDSIADKLVEKVSALVNNLTVGMPEDNADITPLIDTKAADYVEGLIKDAQEKGAKEVISFKREGNLISPVLFDNVTTDMRLAWEEPFGPVLPFIRVNSVEEAIEISNKSEYGLQASVFTNNFPLAFKIAEQLEVGTVHINNKTQRGTDNFPFLGAKKSGAGVQGVKYSIEAMTTVKSTVFDIAK

SEQ ID NO: 268 - protein, 497 aa, Glycine soja
MAAGTGLFAEILDGDVYKYYADGEWKKSASGKSVAIINPTTRKTQYKVQACSQEEVNKVMDLAKSAQKLWAKTPLWKRAELLHKAAAILKEHKAPIAECLVKEIAKPAKDAVTEVVRSGDLVSYTAEEGVRILGEGKFLVSDSFPGNERTKYCLTSKIPLGVILAIPPFNYPVNLAVSKIAPALIAGNSIVLKPPTQGAVSALHMVHCFHLAGFPKGLINCVTGKGSEIGDFLTMHPGVNCISFTGGDTGIAISKKAGMIPLQMELGGKDACIVLEDADLDLVAANIIKGGFSYSGQRCTAVKVVLVMESAADALVEKVKAKVAKLTVGPPEDDCDITPVVSESSANFIEGLVLDAKEKGATFCQEYKREGNLIWPLLLDNVRPDMRIAWEEPFGPVLPVIRINSVEEGIHHCNASNFGLQGCVFTKDVNKAIMISDAMETGTVQINSAPARGPDHFPFQGIKDSGIGSQGITNSINMMTKVKTTVINLPSPSYTMG

SEQ ID NO: 269 - protein, 475 aa, Streptococcus sp. DD12
MTKDYKNYVNGEWKGSESKIEIFEPANGELLGTVPAMSQADVDEVMAAAKAALPAWRALSYTERAAYLHKAADILERDAEKIGAVLSKEIAKGYKSAVGEVVRTAEIIHFAAEEGLRMEGEVLEGGAFDAGSKKKIAIVRREPVGLVLAISPFNYPVNLAGSKIAPALIAGDVVAFKPPTQGSISGLLLAEAFVEAGIPAGVLNTITGRGSVIGDYIVEHKAVDFINFTGSTPVGENIGRLAGMRPIMLELGGKDAAIVLEDADLDLTAKNIVAGAFDYSGQRCTAIKRVLVMDSVADELVEKVTALVANITVGMPEDSASVTPLIDTKAADFVQGLIDDAAEKGATAKTELKREGNLIYPTVFDHVTTDMRLAWEEPFGPVLPFIRVSSVEEAIKISNESEFGLQGAVFTQDYPRAFAIAEQLEVGTVHINNKTQRGTDNFPFLGVKSSGAGTQGVKYSIEAMTRVKSTVFDIK

SEQ ID NO: 270 - protein, 479 aa, Bacillus thuringiensis
MTTSNTYKFYLNGEWRESSSGETIEIPSPYLHEVIGQVQAITRGEVDEAIASAKEAQKSWAEASLQDRAKYLYKWADELVNMQDEIADIIMKEVGKGYKDAKKEVVRTADFIRYTIEEALHMHGESMMGDSFPGGTKSKLAIIQRAPLGVVLAIAPFNYPVNLSAAKLAPALIMGNAVIFKPATQGAISGIKMVEALHKAGLPKGLVNVATGRGSVIGDYLVEHEGINMVSFTGGTNTGKHLAKKASMIPLVLELGGKDPGIVREDADLQDAANHIVSGAFSYSGQRCTAIKRVLVHENVADELVSLVKEQVAKLSVGSPEQDSTIVPLIDDKSADFVQGLVDDAVEKGATIVIGNKRERNLIYPTLIDHVTEEMKVAWEEPFGPILPIIRVSSDEQAIEIANKSEFGLQASVFTKDINKAFAIANKIETGSVQINGRTERGPDHFPFIGVKGSGMGAQGIRKSLESMTREKVTVLNLV

SEQ ID NO: 271 - protein, 496 aa, Arabidopsis thaliana
MAGTGLFAEILDGEVYKYYADGEWKTSSSGKSVAIMNPATRKTQYKVQACTQEEVNAVMELAKSAQKSWAKTPLWKRAELLHKAAAILKDNKAPMAESLVKEIAKPAKDSVTEVVRSGDLISYCAEEGVRILGEGKFLLSDSFPGNDRTKYCLTSKIPLGVVLAIPPFNYPVNLAVSKIAPALIAGNSLVLKPPTQGAVSCLHMVHCFHLAGFPKGLISCITGKGSEIGDFLTMHPAVNCISFTGGDTGISISKKAGMIPLQMELGGKDACIVLDDADLDLVASNIIKGGFSYSGQRCTAVKVVLVMESVADELVEKVKAKVAKLTVGPPEENSDITAVVSESSANFIEGLVMDAKEKGATFCQEYKREGNLIWPLLLDNVRPDMRIAWEEPFGPVVPVLRINSVEEGINHCNASNFGLQGCVFTKDINKAILISDAMETGTVQINSAPARGPDHFPFQGLKDSGIGSQGVTNSINLMTKVKTTVINLPTPSYSMG

SEQ ID NO: 272 - protein, 486 aa, Bacillus litoralis
MLASVSAIKVTDYKFYVNGQWKESQSGQTIDIRSPYLYEVMGRVQVITKEEVDEAIGFARGAQIEWAETPLQERAKYLYKWADELVNMQDEIAEIIMTEVGKGLKDAKNEVVRTADFIRYTVEEALHMHGESMKGDSFPGGSKSKIAMIERVPLGIVLAISPFNYPVNLSAAKLAPALIAGNAVIFKPATQGAISGIKMIEALHKAGFPKGLVNLITGRGSVIGDYLVEHKGIDMISFTGGTNTGVHLAKKAAMIPLVLELGGKDPGIVREDADLVEAAKQIISGAFSYSGQRCTAIKRVLVHESIADELVGILKGEIEKLAVGSPEEGNTVVPLIDDQSADFVQGLIDDAIERGATVVIGHKRERNLIYPTLLDHVTEDMSVAWEEPFGPVLPVIRISSDEEAIDIANKSEFGLQASVFTKDINKAFAIANKIETGSVQINGRTERGPDHFPFIGVKGSGMGAQGIRRSIESMTREKVTVLNLSL

SEQ ID NO: 273 - protein, 476 aa, Streptococcus hyointestinalis
MTKAYKNYVNGEWKLSEESIEIFAPATGESLGTVPAMTTAEVDEVYAKAKAAQPAWRALSYVERAAYLHKVADILVRDAEKIGAVLSKEIAKGYKSAVSEVIRTAEIINYAAEEGLRMEGEVLEGGSFEAASKNKIAIVRREPVGLVLAISPFNYPINLAGSKIAPALISGNVVALKPPTQGSISGLLLAEAFAEAGLPAGVFNTITGRGSVIGDYIVEHEAVNFINFTGSTPIGERIGKLAGMRPIMLELGGKDSAIVLEDADLDLTAKNIIAGAFGYSGQRCTAVKRVLVMDSVADELVEKIRQQVLDLTIGNPEDDADITPLIDKNAADFVEGLINDASDKGAEALTEIKREGNLICPVLFDKVTTDMRLAWEEPFGPVLPIIRVKSVEEAIEISNKSEYGLQASVFTNNFPLAFKIASQLEVGTVHINNKTQRGTDNFPFLGAKKSGAGVQGVKYSIEAMTSVKSVVFDIAK

SEQ ID NO: 274 - protein, 498 aa, Zea mays
MALAGTGVFAEILDGEVYRYYADGEWRTSASGKSVAIVNPTTRKTQYRVQACTQEEVNKAMDAAKVAQKAWARTPLWKRADVLHKAAAILKEHKAPIAECLVKEIAKPAKDAVSEVVRSGDLVSYTAEEGVRILGEGKLVVSDSFPGNERNKYCLSSKIPLGVVLAIPPFNYPANLAGSKIGPALIAGNALVLKPPTQGAVAALHMVHCFHLAGFPKGLISCVTGKGSEIGDFLTMHPGVNCISFTGGDTGIAISKKAGMVPLQMELGGKDACIVLEDADLDLVSANIVKGGFSYSGQRCTAVKVVLIMESIADAVVQKVNAKLAKLKVGPPEDDSDITPVVTESSANFIEGLVMDAKEKGATFCQEYRREGNLIWPLLLDHVRPDMRIAWEEPFGPVLPVIRINSVEEGIHHCNASNFGLQGCIFTRDINKAILISDAMETGTVQINSAPARGPDHFSFQGLKDSGIGSQGITNSINMMTKVKSTVINLPSPSYTMG

SEQ ID NO: 275 - protein, 476 aa, Lactobacillus delbrueckii
MTEHYLNYVNGEWRDSADAIEIFEPATGKSLGTVPAMSHEDVDYVMNSAKKALPAWRALSYVERAAYLQKAADILYRDAEKIGSTLSKEIAKGLKSSIGEVTRTAEIVEYTAKVGVTLDGEVMEGGNFEAASKNKLAVVRREPVGLVLAISPFNYPVNLAGSKIAPALMGGNVVAFKPPTQGSISGLLLAKAFAEAGLPAGVFNTITGRGRVIGDYIVEHPAVNFINFTGSSAVGKNIGKLAGMRPIMLELGGKDAAIVLEDADLDLTAKNIVAGAFGYSGQRCTAVKRVLVMDSVADELVEKVTALAKDLTVGIPEEDADITPLIDTKSADYVQGLIEEAAEKGAKPLFDFKREGNLIYPMVMDQVTTDMRLAWEEPFGPVLPFIRVKSADEAVMIANESEYGLQSSVFSRNFEKAFAIAGKLEVGTVHINNKTQRGPDNFPFLGVKSSGAGVQGVKYSIQAMTRVKSVVFNIED

SEQ ID NO: 276 - protein, 475 aa, Streptococcus pluranimalium
MSKQYKNLVNGEWKLSDNDIKIYAPATGEELGSVPAMSQEDVDYVYETARAAQPAWRALSYVERAAYLHKAADILVRDAEKIGAVLSKEVAKGYKAAVSEVIRTAEIVRYAAEEGVRMEGEVLEGGSFDAASKKKIAIVRREPLGLVLAISPFNYPVNLAGSKIAPALISGNVVALKPPTQGSISGLLLAEVFAEAGLPAGVFSTITGRGSVIGDYIVEHEAVNFINFTGSTPVGERIGKMAGMRPIMLELGGKDSAIVLKDADLEKAAKNIVDGAFGYSGQRCTAVKRVLVQEEVADELVEIIREKVLKLTIGNPEDNADITPLIDTGAADFVEGLINDAVEKGAEVKTEIKREGNLICPVLFDKVTTDMKLAWEEPFGPVLPVIRVKSVEEAIEISNQSEYGLQASVFTNDFPLAFSIAEQLEVGTVHINNKTQRGTDNFPFLGAKKSGAGVQGVKYSIEAMTSVKSVVFDIK

SEQ ID NO: 277 - protein, 496 aa, Nicotiana plumbaginifolia
MAGNGVFVDIIEGDVFKYYSEGEWKKSASGKSVAIINPTTRKTQYKVQACTQEEVNKVMEVAKTAQKSWAKTPLWKRAELLHKAAAILKEHKAPIAECLVKEIAKPAKDAVTEVVRSGDLVSYTAEEGVRILGEGKFLVSDSFPGNERTKYCLTSKIPLGVILAIPPFNYPVNLAVSKIAPALIAGNSLVLKPPTQGAVACLHMVHCFHLAGFPKGLISCVTGKGSEIGDFLTMHPGVHCISFTGGDTGVAISKKAGMIPLQMELGGKDACIVLEDADLDLAAGSIVKGGFSYSGQRCTAVKVVLVMESVADALVEKVNAKVAKLTVGPPEDDCDITPVVSESSANFIEGLVMDAKQKNATFCQQYKREGNLIWPLLLDNVRPDMRIAWEEPFGPVLPVIRINSVEEGIHHCNASNFGLQGCVFTKDINKAILISDAMETGTVQINSAPARGPDHFPFQGIKDSGIGSQGITNSINMMTKVKTTVINLPTPSYTMG

SEQ ID NO: 278 - protein, 475 aa, Streptococcus macacae
MTKQYKDYVNGEWKLSKNDIKIYEPASGAELGLVPAMSTEEVDYVYASAHKALKEWRALSYVERAAYLHKVADILERDAEKIGAVLSKEVAKGYKSAVSEVIRTAEIINYAAEEGLRMEGEVLEGGSFEAASKKKIAVVRREPVGLVLAISPFNYPVNLAGSKIAPALIAGNVVAFKPPTQGSISGLLLAEAFAEAGLPAGVFNTITGRGSEIGDYIVEHPAVNFINFTGSTPIGERIGRMAGMRPIMLELGGKDSAIVLEDADLELTAKNIVAGAFGYSGQRCTAVKRVLVMEGVADKLVEKIREKVLALTIGNPENDADITPLIDTKAADFVEGLINDAKEKGADNLTEIKREGNLICPVLFDKVTTDMRLAWEEPFGPVLPIIRVKSVEEAIAISNQSEYGLQASIFTNDFPRAFGIAEQLEVGTVHLNNKTQRGTDNFPFLGAKKSGAGIQGVKYSIEAMTTVKSVVFDIK

SEQ ID NO: 279 - protein, 475 aa, Streptococcus mutans
MTKQYKNYVNGEWKLSENEIKIYEPASGAELGSVPAMSTEEVDYVYASAKKAQPAWRSLSYIERAAYLHKVADILMRDKEKIGAVLSKEVAKGYKSAVSEVVRTAEIINYAAEEGLRMEGEVLEGGSFEAASKKKIAVVRREPVGLVLAISPFNYPVNLAGSKIAPALIAGNVIAFKPPTQGSISGLLLAEAFAEAGLPAGVFNTITGRGSEIGDYIVEHQAVNFINFTGSTGIGERIGKMAGMRPIMLELGGKDSAIVLEDADLELTAKNIIAGAFGYSGQRCTAVKRVLVMESVADELVEKIREKVLALTIGNPEDDADITPLIDTKSADYVEGLINDANDKGAAALTEIKREGNLICPILFDKVTTDMRLAWEEPFGPVLPIIRVTSVEEAIEISNKSEYGLQASIFTNDFPRAFGIAEQLEVGTVHINNKTQRGTDNFPFLGAKKSGAGIQGVKYSIEAMTTVKSVVFDIK

SEQ ID NO: 280 - protein, 479 aa, Bacillus cereus; identical to SEQ ID NO: 270

SEQ ID NO: 281 - DNA, 19 bp, Artificial Sequence
  Artificial DNA Primer
tcttttcgcgccctggaaa

SEQ ID NO: 282 - DNA, 48 bp, Artificial Sequence
  Artificial DNA Primer
tttttattattagtctttttttttttttgacaatatctgtatgatttg

SEQ ID NO: 283 - DNA, 19 bp, Artificial Sequence
  Artificial DNA Primer
tcttttcgcgccctggaaa

SEQ ID NO: 284 - DNA, 39 bp, Artificial Sequence
  Artificial DNA Primer
tttgttctagcttaattatagttcgttgaccgtatattc

SEQ ID NO: 285 - DNA, 32 bp, Artificial Sequence
  Artificial DNA Primer
ggagattgataagacttttctagttgcatatc

SEQ ID NO: 286 - DNA, 32 bp, Artificial Sequence
  Artificial DNA Primer
tcagtccaatgacagtattttctccttctcac

SEQ ID NO: 287 - DNA, 26 bp, Artificial Sequence
  Artificial DNA Primer
cggcatgcaaacatctacacaattag

SEQ ID NO: 288 - DNA, 27 bp, Artificial Sequence
  Artificial DNA Primer
cagtgttcatggtctgatcgttgtatg

SEQ ID NO: 289 - protein, 477 aa, Streptococcus thermophilus
MAKQYKNYVNGEWKTSENSITIYAPANGEELGSVPAMSQAEVDEVYAAAKAALPAWRALSYAERAAYLHKAADILERDAEKIGQVLSKEISKGLKSAIGEVVRTAEIIHYAAEEGLRLEGEVLEGGAFDAGSKKKIAVVRREPVGLVLAISPFNYPVNLAGSKIAPALIAGDVVAFKPPTQGSISGLLLVEAFVEAGIPAGVLNSITGRGSVIGDYIVEHKAVDFINFTGSTPVGENIGRLAAMRPVMLELGGKDAAIVLEDADLDLTAKNIVAGAFDYSGQRCTAIKRVLVMDSVADELVEKVTALVGNITVGMPEESASVTPLIDTKAADFVQGLIDDAVEQGATAKTELKREGNLIYPAVFDHVTTDMRLAWEEPFGPVLPFIRVSSVEEAIKISNESEFGLQGAVFTQDYPRAFAIAEQLEVGTVHINNKTQRGTDNFPFLGVKGSGAGTQGVKYSIEAMTRVKSTVFDISDY

SEQ ID NO: 290 - protein, 475 aa, Streptococcus urinalis
MTKQYKNYVNGEWKLSENEIKIYAPASGEELGSVPAMTQAEVDDVYASAKAALPAWRALSYVERANYLHKAADILVRDAEKIGSVLSQEVAKGHKSAVSEVIRTAEIINYAAEEGLRMEGEVLEGGSFEAASKKKIAIVRREPVGLVLAISPFNYPVNLAGSKIAPALIAGNVVALKPPTQGSISGILLAQAFAEAGIPAGVFNTITGRGSVIGDYIVEHEAVNFINFTGSTPVGERIGKLAGMRPIMLELGGKDSAIVLEDADLDVAAKNIVAGAFGYSGQRCTAVKRVLVMDSVADALVEKVSQKVSALTIGNPEDDADITPLIDTKAADFVEGLINDAKEKGAQPLHEIKREGNLVCPLVFDKVTTDMRLAWEEPFGPVLPFIRVKSVEEAIKISNESEYGLQASVFTNNFPRAFAIAEQLEVGTVHINNKTQRGTDNFPFLGAKKSGAGVQGVKYSIEAMTSVKSVVFDIE

SEQ ID NO: 291 - protein, 475 aa, Streptococcus canis
MTTQYKNLVNGEWKLSENEIKIYAPATGEELGSVPAMSREEVDAVYGAARQALAGWRALSYVERAAFLHKAADILVRDAEKIGAILSKEVAKGHKAAVSEVIRTAEIINYAAEEGLRMEGEVLEGGSFEAASKKKIAIVRREPVGLVLAISPFNYPVNLAGSKIAPALIAGNVVALKPPTQGSISGLLLAEAFAEAGIPAGVFNTITGRGSVIGDYIVEHEAVNFINFTGSTPIGERIGKLAGMRPIMLELGGKDSAIVLEDADLDLAAKNIVAGAFGYSGQRCTAVKRVLVMESVADDLVEKIRDKVLQLTIGNPEDNADITPLIDTSAADFVEGLIKDAVDKGATAHTDIKREGNLICPILFDHVTTDMRLAWEEPFGPVLPIIRVASVEEAIKISNESEYGLQASIFTTNFPQAFGIAEQLEVGTVHINNKTQRGTDNFPFLGAKKSGAGVQGVKYSIEAMTSVKSVVFDIQ

SEQ ID NO: 292 - protein, 475 aa, Streptococcus thoraltensis
MSKQYKNLVNGEWKLSDNEIKIYAPATGEELGSVPAMSQEEVDYVYETAKAAQPAWRALSYVERAAYLHKVADILDRDAEKIGEVLSKEIAKGYKAAVSEVTRTADIIRYAAEEGVRMQGEVLEGGSFDAASKKKIAMVRREPLGLVLAISPFNYPVNLAGSKIAPALISGNVVALKPPTQGSISGLVLAEVFAEAGIPAGVFSTITGRGSVIGDYIVEHEAVNFINFTGSTPVGERIGKMAGMRPIMLELGGKDSAIVLEDADLEVAAKNIVDGAFGYSGQRCTAVKRVLVMDSVADELVEMLREKVLKLTVGNPEDNADITPLIDTAAADFVEGLVNDAVEKGADAKTDILREGNLIYPILFDNVTTDMKLAWEEPFGPVLPVIRVSSVEEAIEISNKSEYGLQASVFTNDFPLAFSIAEQLEVGTVHINNKTQRGTDNFPFLGAKKSGAGTQGVKYSIEAMTTVKSVVFDIK

SEQ ID NO: 293 - protein, 475 aa, Streptococcus dysgalactiae
MTTQYKNLVNGDWKLSESDIKIYAPATGEELGSVPAMTQAEVDAVYASAKKALPAWRALSYVERAAYLHKAADILVRDAEKIGAVLSKEVAKGHKAAVSEVIRTAEIINYAAEEGLRMEGEVLEGGSFEAASKKKIAIVRREPVGLVLAISPFNYPVNLAGSKIAPALIAGNVVALKPPTQGSISGLLLAEAFAEAGIPAGVFNTITGRGSVIGDYIVEHEAVNFINFTGSTPIGEGIGKLAGMRPIMLELGGKDSAIVLEDADLALAAKNIVAGAFGYSGQRCTAVKRVLVMDKVADQLAAEIKTLVEKLSVGMPEDDADITPLIDTKAADFVEGLIKDAADKGATALTTFNREGNLISPVLFDHVTTDMRLAWEEPFGPVLPIIRVTSVEEAIEISNASEYGLQASIFTNNFPKAFGIAEQLEVGTVHLNNKTQRGTDNFPFLGAKKSGAGVQGVKYSIEAMTTVKSVVFDIQ

SEQ ID NO: 294 - protein, 475 aa, Streptococcus pyogenes
MAKQYKNLVNGEWKLSENEITIYAPATGEELGSVPAMTQAEVDAVYASAKKALPAWRALSYVERAAYLHKAADILVRDAEKIGAVLSKEVAKGHKAAVSEVIRTAEIINYAAEEGLRMEGEVLEGGSFEAASKKKIAIVRREPVGLVLAISPFNYPVNLAGSKIAPALIAGNVVALKPPTQGSISGLLLAEAFAEAGIPAGVFNTITGRGSVIGDYIVEHEAVNFINFTGSTPIGEGIGKLAGMRPIMLELGGKDSAIVLEDADLALAAKNIVAGAFGYSGQRCTAVKRVLVMDKVADQLAAEIKTLVEKLSVGMPEDDADITPLIDTKAADFVEGLIKDATDKGATALTAFNREGNLISPVLFDHVTTDMRLAWEEPFGPVLPIIRVTTVEEAIKISNESEYGLQASIFTTNFPKAFGIAEQLEVGTVHLNNKTQRGTDNFPFLGAKKSGAGVQGVKYSIEAMTTVKSVVFDIQ

SEQ ID NO: 295 - protein, 475 aa, Streptococcus ictaluri
MTKEYKNLVNGEWKLSDNNITIYEPATGKALGSVPAMSQEEVDYVYASAKQALPKWRALSYVERAAYLHKAADILVRDAEKIGAILSKEVAKGFKAAVSEVVRTAEIINYAAEEGLRMQGEVLEGGSFEAASKKKIAIVRREPVGLVLAISPFNYPVNLAGSKIAPALIAGNVVALKPPTQGSISGLLLAEAFAEAGIPAGVFNTITGRGSVIGDYIVEHEAVNFINFTGSTAIGEGIGKLAGMRPIMLELGGKDSAIVLEDADLVLAAKNIVSGAFGYSGQRCTAVKRILVMDSVADQLASEIKILVEQLSVGIPEEDADITPLIDTKAADFVEGLIDDAKAKGALALTECKRDNNLISPVLFDRVTTDMRLAWEEPFGPVLPLIRVSSVEEAIEISNASEYGLQASIFTNNFPQAFAIAEQLEVGTVHLNNKTQRGTDNFPFLGAKKSGAGVQGVKYSIEAMTNLKSVVFDIK

SEQ ID NO: 296 - protein, 486 aa, Clostridium perfringens
MFSCIKGKERTFRNLINGEWINSSSDKFIDIYSPVGNCLVGKVPAMTTDEVDLAIKSAKEAQKVWRNVPVNKRAEILYKAADILIEKVEDIAEIMMREIGKDKKSAESEILRSADYIKFTADTAKNLSGESIPGDSFPGFKRNKISLVTREPLGVVLAISPFNYPINLAASKIAPALVAGNSVVLKPATQGSLCGLYLAKVFEQAGVPAGVLNTVTGRGSEIGDYIVTHPEIDFINFTGSTEVGTRISRITTMVPLLMELGGKDAAIVLADADLDLAASNIVAGAYSYSGQRCTAVKRILVVNEVADKLVEKVKEKVQNLKIGNPLEEDVDIVPLIDSKAADFVWELIDDAREKGAHLLVGGTREENMIYPTLFDNVTTDMRLAWEEPFGPVLPIIRVKDKDEAIEIANKSEYGLQSSVFTENINEAFYVADRLEVGTVQVNNKTERGPDHFPFLGVKASGIGTQGIRYSIESMSRPKATVINLVR

SEQ ID NO: 297 - protein, 486 aa, Clostridium chromiireducens
MFNCIKCENNNFKNLINGEWVGNKDNKVIEIYSPLDNSLVGTVPAMTQEDIDHVIQVAKDGQREWSKVPMNERAEILYKAADILVENANELVDIMIREIGKDRKSSKSEIHRTADFIRFTADTAKNMAGESIPGDTFPGFKRNKISVVNREPLGVVLAISPFNYPINLSASKIAPAIIVGNSVVLKPATQGSLCGLYLAKVFQEAGVPNGVLNTITGKGSEIGDYAVTHKGVNFINFTGSTEVGVKISKITSMVPLLMELGGKDAAIVLKDADLDLAANNIVAGGYSYSGQRCTAVKRILVLEKVADELVKKVKEKMSNLTVGNPLDKDVDIVPLISTKSADFVEELIKDAIDKGADLVVGGKRDGNLIYPTLFDNVTGDMRIAWEEPFGPVLPIMRVKDKDEAIEIANKSEYGLQGAVFTENIEDAFYVADRLEVGTVQVNNKTERGPDHFPFLGVKASGIGTQGIRYSIESMSRPKATVINLVR

SEQ ID NO: 298 - protein, 486 aa, Clostridium botulinum
MFNHIKDENNTFKNLINGEWVSSRSFVEIKSPLSNSLLGRVPAMTKEEVDIAVQTAKEAQKKWNKITINERAEILYKASDILLENIDELSELMMMEIAKDRKSCRSEVSRTSDFIKFTADTAKNLSGESIPGDSFPGFKNNKVSIVKREPLGVVLAISPFNYPINLSASKIAPGLMAGNSVVLKPATQGSLCGLYLARIFEKAGVPAGVLNTITGKGSEIGDYITTHKGINFINFTGSTEVGARISKMTSMVPLLMELGGKDAAIVLEDADLELTASNIVAGGYSYSGQRCTAVKRILVVDKVADKLLEKIKEKMKKLTVGNPLEKDVDIVPLISSKAADFVIELIEDAKSKGADLIVGGNREGNLIYPTLFDNVTTDMRLAWEEPFGPVLPIIRVKDKDEAIEIANKSEYGLQSAVFTKNINDAFYVADKLEVGTVQINNKTERGPDNFPFMGVKASGIGTQGIKYSIESMSRPKATIINLSIHN

SEQ ID NO: 299 - protein, 479 aa, Bacillus anthracis
MTTSNTYKFYLNGEWRESSSGETIEIPSPYLHEVIGQVQAITRGEVDEAIASAKEAQKSWAEASLQDRAKYLYKWADELVNMQDEIADIIMKEVGKGYKDAKKEVVRTADFIRYTIEEALHMHGESMMGDSFPGGTKSKLAIIQRAPLGVVLAIAPFNYPVNLSAAKLAPALIMGNAVIFKPATQGAISGIKMVEALHKAGLPKGLVNVATGRGSVIGDYLVEHEGINMVSFTGGTNTGKHLAKKAAMIPLVLELGGKDPGIVREDADLQDAANHIVSGAFSYSGQRCTAIKRVLVHENVADELVGLLKEQVAKLSVGSPEQDSTIVPLIDDKSADFVQGLVDDAVEKGATIVIGNNRERNLIYPTLIDHVTEEMKVAWEEPFGPILPIIRVSSDEQAIEIANKSEFGLQASVFTKDINKAFAIANKIETGSVQINGRTERGPDHFPFIGVKGSGMGAQGIRKSLESMTREKVTVLNLV

SEQ ID NO: 300 - protein, 334 aa, Pyrococcus furiosus
MKIKVGINGYGTIGKRVAYAVTKQDDMELIGVTKTKPDFEAYRAKELGIPVYAASEEFLPRFEKAGFEVEGTLNDLLEKVDIIVDATPGGMGEKNKQLYEKAGVKAIFQGGEKAEVAQVSFVAQANYEAALGKDYVRVVSCNTTGLVRTLNAIKDYVDYVYAVMIRRAADPNDIKRGPINAIKPSVTIPSHHGPDVQTVIPINIETSAFVVPTTIMHVHSIMVELKKPLTREDVIDIFENTTRVLLFEKEKGFESTAQLIEFARDLHREWNNLYEIAVWKESINVKGNRLFYIQAVHQESDVIPENIDAIRAMFEIAEKWESIKKTNKSLGILK

1. A recombinant host cell comprising, (1) an active pentose fermentation pathway, and (2) a heterologous polynucleotide encoding a non-phosphorylating NADP-dependent glyceraldehyde-3-phosphate dehydrogenase (GAPN).

2. The recombinant host cell of claim 1, wherein the heterologous polynucleotide encoding a non-phosphorylating NADP-dependent glyceraldehyde-3-phosphate dehydrogenase (GAPN) has a mature polypeptide sequence with at least 80% sequence identity to any one of SEQ ID NOs: 262-280 or 289-300.

3. The recombinant host cell of claim 1, wherein the cell comprises an active xylose fermentation pathway.

4. The recombinant host cell of claim 3, wherein the cell comprises one or more active xylose fermentation pathway genes selected from:
a heterologous polynucleotide encoding a xylose isomerase (XI), and
a heterologous polynucleotide encoding a xylulokinase (XK).

5. The recombinant host cell of claim 3, wherein the cell comprises one or more active xylose fermentation pathway genes selected from:
a heterologous polynucleotide encoding a xylose reductase (XR),
a heterologous polynucleotide encoding a xylitol dehydrogenase (XDH), and
a heterologous polynucleotide encoding a xylulokinase (XK).

6. The recombinant host cell of claim 1, wherein the cell comprises an active arabinose fermentation pathway.

7. The recombinant host cell of claim 6, wherein the cell comprises one or more active arabinose fermentation pathway genes selected from:
a heterologous polynucleotide encoding a L-arabinose isomerase (AI),
a heterologous polynucleotide encoding a L-ribulokinase (RK), and
a heterologous polynucleotide encoding a L-ribulose-5-P4-epimerase (R5PE).

8. The recombinant host cell of claim 6, wherein the cell comprises one or more active arabinose fermentation pathway genes selected from:
a heterologous polynucleotide encoding an aldose reductase (AR),
a heterologous polynucleotide encoding a L-arabinitol 4-dehydrogenase (LAD),
a heterologous polynucleotide encoding a L-xylulose reductase (LXR),
a heterologous polynucleotide encoding a xylitol dehydrogenase (XDH) and
a heterologous polynucleotide encoding a xylulokinase (XK).

9. The recombinant host cell of claim 1, wherein the cell further comprises a heterologous polynucleotide encoding a glucoamylase.

10. The recombinant host cell of claim 1, wherein the cell further comprises a heterologous polynucleotide encoding an alpha-amylase.

11. The recombinant host cell of claim 1, wherein the cell is capable of higher anaerobic growth rate on xylose and/or arabinose compared to the same cell without the heterologous polynucleotide encoding a non-phosphorylating NADP-dependent glyceraldehyde-3-phosphate dehydrogenase (GAPN).

12. The recombinant host cell of claim 1, wherein the cell is capable of a higher rate of xylose and/or arabinose consumption (compared to the same cell without the heterologous polynucleotide encoding a non-phosphorylating NADP-dependent glyceraldehyde-3-phosphate dehydrogenase (GAPN).

13. The recombinant host cell of claim 1, wherein the cell is capable of higher xylose and/or arabinose consumption compared to the same cell without the heterologous polynucleotide encoding a non-phosphorylating NADP-dependent glyceraldehyde-3-phosphate dehydrogenase (GAPN) at 120 hours fermentation.

14. The recombinant host cell of claim 1, wherein the cell is capable of higher ethanol production compared to the same cell without the heterologous polynucleotide encoding a non-phosphorylating NADP-dependent glyceraldehyde-3-phosphate dehydrogenase (GAPN).

15. The recombinant host cell of claim 1, wherein the cell is a Saccharomyces cerevisiae cell.

16. A composition comprising the recombinant host cell of claim 1 and one or more naturally occurring and/or non-naturally occurring components, such as components are selected from the group consisting of: surfactants, emulsifiers, gums, swelling agents, and antioxidants.

17. A method of producing a derivative of a recombinant host cell of claim 1, the method comprising:
(a) providing:
(i) a first host cell; and
(ii) a second host cell, wherein the second host cell is a recombinant host cell of claim 1;
(b) culturing the first host cell and the second host cell under conditions which permit combining of DNA between the first and second host cells;
(c) screening or selecting for a derive host cell.

18. A method of producing a fermentation product from a starch-containing or cellulosic-containing material, the method comprising:
(a) saccharifying the starch-containing or cellulosic-containing material; and
(b) fermenting the saccharified material of step (a) with the recombinant host cell of claim 1 under suitable conditions to produce the fermentation product.

19. The method of claim 18, wherein the method results in higher yield of fermentation product when compared to the method using the same cell without the heterologous polynucleotide encoding a non-phosphorylating NADP-dependent glyceraldehyde-3-phosphate dehydrogenase (GAPN).

20. (canceled)

21. The recombinant host cell of claim 1, wherein an endogenous glycerol 3-phosphate dehydrogenase (GPD) and/or glycerol 3-phosphatase (GPP) gene is disrupted.
